(19) United States
(12) Patent Application Publication
(10) Pub. No.: US 2008/0107668 A1
(43) Pub. Date: May 8, 2008

(54) CYTOTOXIC T-LYMPHOCYTE-INDUCING IMMUNOGENS FOR PREVENTION, TREATMENT, AND DIAGNOSIS OF CANCER

(75) Inventors: Ramila Philip, Ivyland, PA (US); Lorraine H. Keller, Pipersville, PA (US)

Correspondence Address: SYNNESTVEDT & LECHNER, LLP, 1101 MARKET STREET, 26TH FLOOR, PHILADELPHIA, PA, 19107-2950, US

(73) Assignee: Immunotope, Inc., Doylestown, PA (US)

(21) Appl. No.: 11/846,872

(22) Filed: Aug. 29, 2007

Related U.S. Application Data
(60) Provisional application No. 60/841,121, filed on Aug. 30, 2006.

(51) Int. Cl. A61K 39/00; A61K 35/00; A61K 48/00; A61P 35/00; C07H 21/00; C07K 14/00; C07K 16/00; C07K 7/00; C12N 5/00; G01N 33/00

(52) U.S. Cl. 424/185.1; 424/93.71; 435/375; 436/86; 514/44; 530/324; 530/327; 530/328; 530/387.9; 536/23.5

(57) ABSTRACT

The present invention relates to compositions and methods for the prevention, treatment, and diagnosis of cancer, especially carcinomas, such as breast carcinoma. The invention discloses peptides, polypeptides, and polynucleotides that can be used to stimulate a CTL response against breast or cancer.

### CROSS-REFERENCE TO RELATED APPLICATIONS

[0001] This application claims the benefit of priority from U.S. provisional application No. 60/841,121, filed Aug. 30, 2006, the contents of which are herein incorporated by reference.

### FIELD OF THE INVENTION

[0002] The present invention relates generally to the field of immunogens whose structures incorporate polypeptides comprising epitopic peptides derived from proteins expressed by cancer cells and to uses of said immunogens in eliciting cytotoxic T lymphocyte (CTL) responses for the diagnosis, prevention and treatment of cancer, preferably carcinoma, most preferably breast carcinoma.

### BACKGROUND OF THE INVENTION

[0003] The mammalian immune system has evolved a variety of mechanisms to protect the host from cancerous cells, an important component of this response being mediated by cells referred to as T cells. Cytotoxic T lymphocytes (CTLs) are specialized T cells that function primarily by recognizing and killing cancerous cells or infected cells, but also by secreting soluble molecules referred to as cytokines that can mediate a variety of effects on the immune system.

[0004] Evidence suggests that immunotherapy designed to stimulate a tumor-specific CTL response would be effective in controlling cancer. For example, it has been shown that human CTLs recognize sarcomas (Slovin, S. F. et al., J. Immunol., 137:3042-3048, (1987)), renal cell carcinomas (Schendel, D. J. et al., J. Immunol., 151:4209-4220, (1993)), colorectal carcinomas (Jacob, L. et al., Int. J. Cancer, 71:325-332, (1997)), ovarian carcinomas (Ioannides, C. G. et al., J. Immunol., 146:1700-1707, (1991)) (Peoples, G. E. et al., Surgery, 114:227-234, (1993)), pancreatic carcinomas (Peiper, M. et al., Eur. J. Immunol., 27:1115-1123, (1997); Wolfel, T. et al., Int. J. Cancer, 54:636-644, (1993)), squamous tumors of the head and neck (Yasumura, S. et al., Cancer Res., 53:1461-1468, (1993)), and squamous carcinomas of the lung (Slingluff, C. L. Jr et al., Cancer Res., 54:2731-2737, (1994); Yoshino, I. et al., Cancer Res., 54:3387-3390, (1994)). The largest number of reports of human tumor-reactive CTLs have concerned cancers (Boon, T. et al., Ann. Rev. Immunol., 12:337-365, (1994)). The ability of tumor-specific CTLs to mediate tumor regression, in both human (Rosenberg, S. A. et al., N. Engl. J. Med., 319:1676-1680, (1988)) and animal models (Celluzzi, C. M. et al., J. Exp. Med., 183:283-287, (1996); Mayordomo, J. I. et al., Nat. Med., 1:1297-1302, (1995); Zitvogel, L. et al., J. Exp. Med., 183:87-97, (1996)), suggests that methods directed at increasing CTL activity would likely have a beneficial effect with respect to tumor treatment.

[0005] In order for CTLs to kill or secrete cytokines in response to a cancer cell, the CTL must first recognize that cell as being cancerous. This process involves the interaction of the T cell receptor, located on the surface of the CTL, with what is generically referred to as an MHC-peptide complex which is located on the surface of the cancerous cell. MHC (Major Histocompatibility Complex)-encoded molecules have been subdivided into two types, and are referred to as class I and class II MHC-encoded molecules.

[0006] In the human immune system, MHC molecules are referred to as human 30 leukocyte antigens (HLA). Within the MHC, located on chromosome six, are three different genetic loci that encode for class I MHC molecules. MHC molecules encoded at these loci are referred to as HLA-A, HLA-B, and HLA-C. The genes that can be encoded at each of these loci are extremely polymorphic, and thus, different individuals within the population express different class I MHC molecules on the surface of their cells. HLA-A1, HLA-A2, HLA-A3, HLA-B7, and HLA-B8 are examples of different class I MHC molecules that can be expressed from these loci. The present disclosure involves peptides that are associated with the HLA-A1, HLAA2, or HLA-A1 1 molecules, HLA-A1 supertypes, HLA-A2 supertypes, and HLA-A11 supertypes. A supertype is a group of HLA molecules that present at least one shared epitope. The present disclosure involves peptides that are associated with HLA molecules, and with the genes and proteins from which these peptides are derived.

[0007] The peptides that associate with the MHC molecules can either be derived from proteins made within the cell, in which case they typically associate with class I MHC molecules (Rock, K. L. and Golde, U., Ann. Rev. Immunol., 17:739-779, (1999)) or they can be derived from proteins that are acquired from outside of the cell, in which case they typically associate with class II MHC molecules (Watts, C., Ann. Rev. Immunol., 15:821-850, (1997)). Peptides that evoke a cancer-specific CTL response most typically associate with class I MHC molecules. The peptides that associate with a class I MHC molecule are typically nine amino acids in length, but can vary from a minimum length of eight amino acids to a maximum of fourteen amino acids in length. A class I MHC molecule with its bound peptide, or a class II MHC molecule with its bound peptide, is referred to as an MHC-peptide complex.

[0008] The process by which intact proteins are degraded into peptides is referred to as antigen processing. Two major pathways of antigen processing occur within cells (Rock, K. L. and Golde, U., Ann. Rev. Immunol., 17:739-779, (1999); Watts, C., Ann. Rev. Immunol., 15:821-850, (1997)). One pathway, which is largely restricted to cells that are antigen presenting cells such as dendritic cells, macrophages, and B cells, degrades proteins that are typically phagocytosed or endocytosed into the cell. Peptides derived in this pathway typically bind to class II MHC molecules. A second pathway of antigen processing is present in essentially all cells of the body. This second pathway primarily degrades proteins that are made within the cells, and the peptides derived from this pathway primarily bind to class I MHC molecules. It is the peptides from this second pathway of antigen processing that are referred to herein. Antigen processing by this latter pathway involves polypeptide synthesis and proteolysis in the cytoplasm. The peptides produced are then transported into the endoplasmic reticulum of the cell, associate with newly synthesized class I MHC molecules, and the resulting MHC-peptide complexes are then transported to the cell surface. Peptides derived from membrane and secreted proteins may also associate with Class I MHC molecules. In some cases these peptides correspond to the signal sequence of the proteins that are cleaved from the protein by the signal peptidase. In other cases, it is thought that some fraction of the membrane and secreted proteins are transported from the endoplasmic reticulum into the cytoplasm where processing subsequently occurs.

[0009] Once bound to the class I MHC molecule and displayed on the surface of a cell, the peptides are recognized by antigen-specific receptors on CTLs. Mere expression of the class I MHC molecule itself is insufficient to trigger the CTL to kill the target cell if the antigenic peptide is not bound to the class I MHC molecule. Several methods have been developed to identify the peptides recognized by CTL, each method relying on the ability of a CTL to recognize and kill only those cells expressing the appropriate class I MHC molecule with the peptide bound to it (Rosenberg, S. A., Immunity, 10:281-287, (1999)). Such peptides can be derived from a non-self source, such as a pathogen (for example, following the infection of a cell by a bacterium or a virus) or from a self-derived protein within a cell, such as a cancerous cell. Examples of sources of self-derived proteins in cancerous cells have been reviewed (Gilboa, E., Immunity, 11:263-270, (1999); Rosenberg, S. A., Immunity, 10:281-287, (1999)) and include: (i) mutated genes; (ii) aberrantly expressed genes such as an alternative open reading frame or through an intron-exon boundary; (iii) normal genes that are selectively expressed in only the tumor and the testis; and (iv) normal differentiation genes that are expressed in the tumor and the normal cellular counterpart.

[0010] Four different methodologies have typically been used for identifying the peptides that are recognized by CTLs. These are: (i) the genetic method; (2) motif analysis; (3) SErological analysis of REcombinant cDNA expression libraries (SEREX™); and (iv) the immunological and analytical chemistry approach or the Direct Identification of Relevant Epitopes for Clinical Therapeutics (DIRECT™).

[0011] The genetic method is an approach in which progressively smaller subsets of cDNA libraries from tumor cells are transfected into cells that express the appropriate MHC molecule but not the tumor-specific epitope. The molecular clones encoding T cell epitopes are identified by their ability to reconstitute tumor specific T cell recognition of transfected cells. The exact T cell epitope is then identified by a combination of molecular subcloning and the use of synthetic peptides based on the predicted amino acid sequence. Such methods, however, are susceptible to inadvertent identification of cross-reacting peptides, and are not capable of identifying important post-translational modifications.

[0012] Motif analysis involves scanning a protein for peptides containing known class I MHC binding motifs, followed by synthesis and assay of the predicted peptides for their ability to be recognized by tumor-specific CTL. This approach requires prior knowledge of the protein from which the peptides are derived. This approach is also greatly hampered by the fact that not all of the predicted peptide epitopes are presented on the surface of a cell (Yewdell, J. W. and Bennink, J. R., Ann. Rev. Immunol., 17:51-88, (1999)), thus additional experimentation is required to determine which of the predicted epitopes is useful.

[0013] The SEREX™ approach relies on using antibodies in the serum of cancer patients to screen cDNA expression libraries for a clone that expresses a protein recognized by the antibody. This methodology presumes that an antibody response will necessarily have developed in the presence of a T cell response, and thus, the identified clone is a good candidate to encode a protein that can be recognized by T cells.

[0014] DIRECT™ involves a combination of cellular immunology and mass spectrometry. This approach involves the actual identification of endogenous CTL epitopes present on the cell surface by sequencing the naturally occurring peptides associated with class I MHC molecules. In this approach, cells are first lysed in a detergent solution, the peptides associated with the class I MHC molecules are purified, and the peptides are fractionated by high performance liquid chromatography (HPLC). Peptide sequencing is readily performed by tandem mass spectrometry (Henderson, R. A. et al., Proc. Natl. Acad. Sci. U.S.A, 90:10275-10279, (1993); Hogan, K. T. et al., Cancer Res., 58:5144-5150, (1998); Hunt, D. F. et al., Science, 255:1261-1263, (1992); Slingluff, C. L. Jr et al., J. Immunol., 150:2955-2963, (1993)).

[0015] Immunization with cancer-derived, class I MHC molecule-associated peptides, or with a parent, or original protein or precursor polypeptide that contains the peptide, or with a gene that encodes a polypeptide or protein containing the peptide, are forms of immunotherapy that can be employed in the treatment of cancer. These forms of immunotherapy require that immunogens be identified so that they can be formulated into an appropriate vaccine. Although a variety of cancer-derived antigens have been identified (Rosenberg, S. A., Immunity, 10:281-287, (1999)), not all of these are appropriate for broad-based immunotherapy because the expression of some peptides is limited to the tumor derived from a specific patient. Furthermore, the number of class I MHC molecules from which tumor-derived peptides have been discovered is largely restricted to HLA-A2. Thus, it would be useful to identify additional HLA-A2-restricted peptides. Additionally, it would be useful to identify peptides that complex with class I MHC molecules other than HLA-A2. Such peptides would be particularly useful in the treatment of cancer patients who do not express the HLA-A2 molecule for example HLA-A1/A11 antigens, HLA-A1 supertypes, HLA-A2 supertypes and HLA-A11 supertypes. Identification of and immunization with a cancer-derived parent or original protein or with a gene that encodes the parent protein is significant because the protein can be administered to patients of any HLA type, because proteins that pass through the MHC pathway are processed in vivo to the correct HLA type-specific epitopes.

[0016] It is also particularly useful to identify antigenic peptides that are derived from different parent proteins, even if the derived peptides associate with the same class I MHC molecule. Because an active immune response can result in the outgrowth of tumor cells that have lost the expression of a particular precursor protein for a given antigenic peptide, it is advantageous to stimulate an immune response against peptides derived from more than one protein, as the chances of the tumor cell losing the expression of two or more proteins is the multiple of the chances of losing each of the individual proteins.

### SUMMARY OF THE INVENTION

[0017] The present invention relates to Immunogens comprising polypeptides with amino acid sequences comprising epitopic sequences selected from the sequences of SEQ ID NO: 1-123 and which immunogens facilitate a cytotoxic T lymphocyte (CTL)-mediated immune response against cancers, especially breast cancer. The present invention also relates to nucleic acid molecules that encode for the polypeptides and/or the full length proteins, their isoforms and splice variants from which the polypeptides are derived, of such immunogens, and which can also be used to facilitate an immune response against cancer.

[0018] The present invention provides compositions comprising the immunogen described herein, and polynucleotides that direct the synthesis of such polypeptides, whereby the oligopeptides and polypeptides of such immunogens are capable of inducing a CTL response against cells expressing a protein comprising an epitopic sequence of at least one of SEQ ID NO: 1-123. The cells are usually cancer cells, preferably carcinoma cells, most preferably breast carcinomas expressing such proteins.

[0019] The present invention further relates to polynucleotides comprising the gene coding for a polypeptide of the immunogens disclosed herein. The present invention also provides methods that comprise contacting a lymphocyte, especially a CTL, with an immunogen or its isoforms or splice variants of the invention under conditions that induce a CTL response against a tumor cell, and more specifically against a breast tumor cell. The methods may involve contacting the CTL with the immunogenic peptide in vivo, in which case the peptides, polypeptides, and polynucleotides of the invention are used as vaccines, and will be delivered as a pharmaceutical composition comprising a pharmaceutically acceptable carrier or delivery system and the immunogen, typically along with an adjuvant or one or more cytokines.

[0020] Alternatively, the immunogens of the present invention can be used to induce a CTL response in vitro. The generated CTL can then be introduced into a patient with cancer, more specifically breast carcinoma, ovarian carcinoma, colorectal carcinoma, lung carcinoma, or prostate carcinoma. Alternatively, the ability to generate CTL in vitro could serve as a diagnostic for cancer generally, including breast carcinoma, ovarian carcinoma, colorectal carcinoma, lung carcinoma, or prostate carcinoma.

### DEFINITIONS

[0021] As used herein and except as noted otherwise, all terms are defined as given below. The term “peptide” is used herein to designate a series of amino acid residues, connected one to the other typically by peptide bonds between the alpha-amino and carbonyl groups of the adjacent amino acids. The peptides are typically 9 amino acids in length, but can be as short as 8 amino acids in length, and as long as 14 amino acids in length.

[0022] The term “oligopeptide” is used herein to designate a series of amino acid residues, connected one to the other typically by peptide bonds between the alpha-amino and carbonyl groups of the adjacent amino acids. The length of the oligopeptide is not critical to the invention as long as the correct epitope or epitopes are maintained therein. The oligopeptides are typically 30 to about 40 amino acid residues in length, and greater than about 14 amino acids in length.

[0023] The term “polypeptide” designates a series of amino acid residues, connected one to the other typically by peptide bonds between the alpha-amino and carbonyl groups of the adjacent amino acids. The length of the polypeptide is not critical to the invention as long as the correct epitopes are maintained. In contrast to the terms peptide or oligopeptide, the term polypeptide is meant to refer to protein molecules of longer than about 40 residues in length.

[0024] A peptide, oligopeptide, polypeptide, protein, or polynucleotide coding for such a molecule is “immunogenic” (and thus an “immunogen” within the present invention) if it is capable of inducing an immune response. In the case of the present invention, immunogenicity is more specifically defined as the ability to induce a CTL-mediated response. Thus, an “immunogen” would be a molecule that is capable of inducing an immune response, and in the case of the present invention, a molecule capable of inducing a CTL response. An immunogen may have one or more isoforms or splice variants that have equivalent biological and immunological activity, and are thus also considered for the purposes of this invention to be immunogenic equivalents of the original, natural polypeptide.

[0025] A T cell “epitope” is a short peptide molecule that binds to a class I or II MHC molecule and that is subsequently recognized by a T cell. T cell epitopes that bind to class I MHC molecules are typically 8-14 amino acids in length, and most typically 9 amino acids in length. T cell epitopes that bind to class II MHC molecules are typically 12-20 amino acids in length. In the case of epitopes that bind to class II MHC molecules, the same T cell epitope may share a common core segment, but differ in the length of the carboxy- and amino-terminal flanking sequences due to the fact that ends of the peptide molecule are not buried in the structure of the class II MHC molecule peptide-binding cleft as they are in the class I MHC molecule peptide-binding cleft.

[0026] Three different genetic loci encode for class I MHC molecules: HLA-A, HLA-B, and HLA-C. HLA-A1, HLA-A2, and HLA-A11 are examples of different class I MHC molecules that can be expressed from these loci. The present invention also involves peptides that are associated with HLA-A1 supertypes, HLA-A2 supertypes, and HLA-A11 supertypes. A supertype is a group of HLA molecules that present at least one shared epitope. MHC molecule peptides that have been found to bind to one member of the MHC allele supertype family (A1 for example) are thought to be likely to bind to other members of the same supertype family (A32 for example; see Table 1, below).

TABLE 1
HLA Supertypes, Motifs and Genotypes

| Super | | |
|---|---|---|
| type | Motif | Genotypes |
| A1 | x [TI (SVLM)] | A*0101, A*0102, A*2501, A*2601, |
| | xxxxxx [WFY] | A*2604, A*3201, A*3601, A*4301, A*8001 |
| A2 | x [LIVMATQ] | A*0201, A*0202, |
| | xxxxxx [LIVMAT] | A*0203, |
| | | A*0204, |
| | | A*0205, |
| | | A*0206, A*0207, A*6802, A*6901 |
| A3 | x [AILMVST] | A*0301, |
| | xxxxxx[RK] | A*1101, A*3101, A*3301, A*6801 |
| A24 | x [YF (WIVLMT)] | A*2301, A*2402, A*2403, A*2404, |
| | xxxxxx [El | A*3001, |
| | (YWLM) I | A*3002, A*3003 |
| B7 | x [P] xxxxxx | B*0702, B*0703, B*0704, B*0705, B*1508, |
| | [ALIMVFWY] | B*3501, |
| | | B*3502, B*3503, B*51, B*5301, B*5401, |
| | | B*5501, |
| | | B*5502, B*5601, B*5602, B*7801 |
| | | B*1401, B*1402, B*1503, B*1510, B*1518, |
| | | B*1509, |
| B27 | x [RKH] xxxxxx | B*2701, B*2702, B*2703, B*2705, B*2706, |
| | [FLY (WMI)] | B*2704, |
| | | B*2707, B*2708, B*3801, B*3901, B*3902, |
| | | B*3802, |
| | | B*3903, B*3904, B*4801, B*7301 |
| | | B*4802, |
| B44 | x [E (D)] xxxxxx | B*18, B*4001, B*4402, |
| | [FWYLIMVA] | B*3701, B*4006, |
| | | B*4403, B*4501, B*4901, |
| | | B*5001 |
| B58 | x [AST] xxxxxx | B*1516, B*1517, B*5701, |
| | [FWY(LIV)] | B*5702, B*58 |
| B62 | x [QL (IVMP)] | B*1301, B*1302, B*1501, B*1506, B*1512, |
| | xxxxxx [FWY | B*1502, |
| | (MIV)] | B*1513, B*1514, B*1519, B*4601, B*52 |
| | | B*1521, |

[0027] As used herein, reference to a DNA sequence includes both single stranded and double stranded DNA. Thus, the specific sequence, unless the context indicates otherwise, refers to the single strand DNA of such sequence, the duplex of such sequence with its complement (double stranded DNA) and the complement of such sequence.

[0028] The term “coding region” refers to that portion of a gene that either naturally or normally codes for the expression product of that gene in its natural genomic environment, i.e., the region coding in vivo for the native expression product of the gene. The coding region can be from a normal, mutated or altered gene, or can even be from a DNA sequence, or gene, wholly synthesized in the laboratory using methods well known to those of skill in the art of DNA synthesis.

[0029] The term “nucleotide sequence” refers to a heteropolymer of deoxyribonucleotides. The nucleotide sequence encoding for a particular peptide, oligopeptide, or polypeptide may be naturally occurring or they may be synthetically constructed. Generally, DNA segments encoding the peptides, polypeptides, and proteins of this invention are assembled from cDNA fragments and short oligonucleotide linkers, or from a series of oligonucleotides, to provide a synthetic gene which is capable of being expressed in a recombinant transcriptional unit comprising regulatory elements derived from a microbial or viral operon.

[0030] The term “expression product” means that polypeptide or protein that is the natural translation product of the gene and any nucleic acid sequence coding equivalents resulting from genetic code degeneracy and thus coding for the same amino acid(s).

[0031] The term “fragment,” when referring to a coding sequence, means a portion of DNA comprising less than the complete coding region whose expression product retains essentially the same biological or immunological function or activity as the expression product of the complete coding region.

[0032] The term “DNA segment” refers to a DNA polymer, in the form of a separate fragment or as a component of a larger DNA construct, that has been derived from DNA isolated at least once in substantially pure form, i.e., free of contaminating endogenous materials and in a quantity or concentration enabling identification, manipulation, and recovery of the segment and its component nucleotide sequences by standard biochemical methods, for example, by using a cloning vector. Such segments are provided in the form of an open reading frame uninterrupted by internal nontranslated sequences, or introns, which are typically present in eukaryotic genes. Sequences of non-translated DNA may be present downstream from the open reading frame, where the same do not interfere with manipulation or expression of the coding regions. The term “primer” means a short nucleic acid sequence that is paired with one strand of DNA and provides a free 3′OH end at which a DNA polymerase starts synthesis of a deoxyribonucleotide chain.

[0033] The term “promoter” means a region of DNA involved in binding of RNA polymerase to initiate transcription.

[0034] The term “open reading frame (ORF)” means a series of triplets coding for amino acids without any termination codons and is a sequence (potentially) translatable into protein.

[0035] The term “isolated” means that the material is removed from its original environment (e.g., the natural environment if it is naturally occurring). For example, a naturally-occurring polynucleotide or polypeptide present in a living animal is not isolated, but the same polynucleotide or polypeptide, separated from some or all of the coexisting materials in the natural system, is isolated. Such polynucleotides could be part of a vector and/or such polynucleotides or polypeptides could be part of a composition, and still be isolated in that such vector or composition is not part of its natural environment.

[0036] The polynucleotides, and recombinant or immunogenic polypeptides, disclosed in accordance with the present invention may also be in “purified” form. The term “purified” does not require absolute purity; rather, it is intended as a relative definition, and can include preparations that are highly purified or preparations that are only partially purified, as those terms are understood by those of skill in the relevant art. For example, individual clones isolated from a cDNA library have been conventionally purified to electrophoretic homogeneity. Purification of starting material or natural material to at least one order of magnitude, preferably two or three orders, and more preferably four or five orders of magnitude is expressly contemplated. Furthermore, the claimed polypeptide which has a purity of preferably 0.001%, or at least 0.01% or 0.1%; and even desirably 1% by weight or greater is expressly contemplated.

[0037] The nucleic acids and polypeptide expression products disclosed according to the present invention, as well as expression vectors containing such nucleic acids and/or such polypeptides, may be in “enriched form.” As used herein, the term “enriched” means that the concentration of the material is at least about 2, 5, 10, 100, or 1000 times its natural concentration (for example), advantageously 0.01%, by weight, preferably at least about 0.1% by weight. Enriched preparations of about 0.5%, 1%, 5%, 10%, and 20% by weight are also contemplated. The sequences, constructs, vectors, clones, and other materials comprising the present invention can advantageously be in enriched or isolated form.

[0038] The term “active fragment” means a fragment that generates an immune response (i.e., has immunogenic activity) when administered, alone or optionally with a suitable adjuvant, to an animal, such as a mammal, for example, a human, and also including a rabbit or a mouse, such immune response taking the form of stimulating a CTL response within the recipient, such as a human. Alternatively, the “active fragment” may also be used to induce a CTL response in vitro.

[0039] As used herein, the terms “portion,” “segment,” and “fragment,” when used in relation to polypeptides, refer to a continuous sequence of residues, such as amino acid residues, which sequence forms a subset of a larger sequence. For example, if a polypeptide were subjected to treatment with any of the common endopeptidases, such as trypsin or chymotrypsin, the oligopeptides resulting from such treatment would represent portions, segments or fragments of the starting polypeptide. This means that any such fragment will necessarily contain as part of its amino acid sequence a segment, fragment or portion, that is substantially identical, if not exactly identical, to a sequence of SEQ ID NO: 124-233, which correspond to the naturally occurring original or “parent” proteins of the peptides of SEQ ID NO: 1-123. When used in relation to polynucleotides, such terms refer to the products produced by treatment of said polynucleotides with endonucleases.

[0040] In accordance with the present invention, the term “percent identity” or “percent identical,” when referring to a sequence, means that a sequence is compared to a claimed or described sequence after alignment of the sequence to be compared (the “Compared Sequence”) with the described or claimed sequence (the “Reference Sequence”). The Percent Identity is then determined according to the following formula:
Percent Identity=100 [1-(C/R)]
wherein C is the number of differences between the Reference Sequence and the Compared Sequence over the length of alignment between the Reference Sequence and the Compared Sequence wherein (i) each base or amino acid in the Reference Sequence that does not have a corresponding aligned base or amino acid in the Compared Sequence and (ii) each gap in the Reference Sequence and (iii) each aligned base or amino acid in the Reference Sequence that is different from an aligned base or amino acid in the Compared Sequence, constitutes a difference; and R is the number of bases or amino acids in the Reference Sequence over the length of the alignment with the Compared Sequence with any gap created in the Reference Sequence also being counted as a base or amino acid.

[0041] If an alignment exists between the Compared Sequence and the Reference Sequence for which the percent identity as calculated above is about equal to or greater than a specified minimum Percent Identity then the Compared Sequence has the specified minimum percent identity to the Reference Sequence even though alignments may exist in which the herein above calculated Percent Identity is less than the specified Percent Identity.

### DETAILED DESCRIPTION OF THE INVENTION

[0042] The present invention relates generally to immunogens and immunogenic compositions, and methods of use thereof, for the prevention, treatment, and diagnosis of cancer, especially carcinomas, including breast carcinomas. Disclosed according to the invention are immunogens comprising proteins or polypeptides whose amino acid sequences comprises one or more epitopic oligopeptides with sequences selected from the group SEQ ID NO: 1-123. In addition, the invention further relates to polynucleotides that can be used to stimulate a CTL response against cancer, and more specifically carcinoma, especially breast carcinomas.

[0043] In accordance with the present invention there are disclosed specific oligopeptide sequences with amino acid sequences shown in SEQ ID NO: 1-123 which represent epitopic peptides (i.e. immunogenic oligopeptide sequences) of at least about 8 amino acids in length, preferably about 9 amino acids in length (i.e., nonapeptides), and no longer than about 14 amino acids in length and present as part of a larger structure, such as a polypeptide or full length protein.

[0044] While the use of specific peptides is restricted to use in patients having certain HLA types or HLA supertypes, there is no such restriction on the use of the parent protein as an immunogen. When the parent protein or immunogen is presented to the antigen processing pathway, it will be appropriately fragmented, processed and presented in the context of HLA type(s) present in the patient.

[0045] The polypeptides forming the immunogens of the present invention have amino acid sequences that comprise at least one stretch, possibly two, three, four, or more stretches of about 8 to 10 or up to 14 residues in length and which stretches differ in amino acid sequence from the sequences of SEQ ID NO: 1-123 by no more than about 1 amino acid residue, preferably a conservative amino acid residue, especially amino acids of the same general chemical character, such as where they are hydrophobic amino acids.

[0046] Said polypeptides can be of any desired length so long as they have immunogenic activity in that they are able, under a given set of desirable conditions, to elicit in vitro or in vivo the activation of cytotoxic T lymphocytes (CTLs) (i.e., a CTL response) against a presentation of a cancer specific protein, especially a carcinoma or sarcoma specific protein where said proteins are presented in vitro or in vivo by an antigen presenting cell (APC). The proteins and polypeptides forming the immunogens of the present invention can be naturally occurring or may be synthesized chemically. According to the present invention the polypeptides may comprise at least one of SEQ ID NO: 124 to 233.

[0047] The present invention is also directed to an isolated polypeptide, especially one having immunogenic activity, the sequence of which comprises within it one or more stretches comprising any 2 or more of the sequences of SEQ ID NO: 1-123 and in any relative quantities and wherein said sequences may differ by one amino acid residues from the sequences of SEQ ID NO: 1-123 in any given stretch of 8 to 10, or up to 14 amino acid residues. Thus, within the present invention, by way of a non-limiting example only, such polypeptide may contain as part of its amino acid sequence, nonapeptide fragments having up to 8 amino acids identical to a sequence of SEQ ID NO: 1, 2, 7, 8 such that the polypeptide comprises, in a specific embodiment, 2 segments with at least 8 residues identical to SEQ ID NO: 1 and SEQ ID NO: 2 and one segment with at least 8 residues identical to SEQ ID NO: 7. In other embodiments, other combinations and permutations of the epitopic sequences disclosed herein may be part of an immunogen of the present invention or of such a polypeptide so long as any such polypeptide comprises at least 2 such epitopes, whether such epitopes are different or the same. Thus, in a specific embodiment, a polypeptide of the present invention may comprise 2 copies of the sequence of SEQ ID NO: 2 at some point or points within its length. Of course, any combinations and permutations of the epitopes disclosed herein, as long as they are present at least two in number in such polypeptides, are expressly contemplated.

[0048] All of the epitopic peptides of SEQ ID NO: 1-123 are derived from proteins expressed by cancer cells and sequences and were identified through the method of Automated High Through-put Sequencing (HTPS). Accordingly, SEQ ID NO: 124-233 are polypeptides that comprise at least one of SEQ ID NO: 1-123.

[0049] Oligopeptides as disclosed herein may themselves be prepared by methods well known to those skilled in the art. (Grant, G. A., Synthetic Peptides: A User's Guide, 1992, W. H. Freeman and Company, New York; Coligan, J. E. et al, Current Protocols in Protein Science, 1999, John Wiley & Sons, Inc., New York).

[0050] Besides the sequences of SEQ ID NO:1-123, the proteins and polypeptides forming the immunogens of the present invention may also comprise one or more other immunogenic amino acid stretches known to be associated with cancer, and more specifically with carcinomas including breast carcinoma, ovarian carcinoma, colorectal carcinoma, lung carcinoma, or prostate carcinoma, and which may stimulate a CTL response whereby the immunogenic peptides associate with HLA-A2, HLA-A1/A11, HLA supertypes, or any class I MHC (i.e., MHC-1) molecule.

[0051] The immunogens of the present invention can be in the form of a composition of one or more of the different immunogens and wherein each immunogen is present in any desired relative abundance. Such compositions can be homogeneous or heterogeneous with respect to the individual immunogenic peptide components present therein, having only one or more than one of such peptides.

[0052] The oligopeptides and polypeptides useful in practicing the present invention may be derived by fractionation of naturally occurring proteins by methods such as protease treatment, or they may be produced by recombinant or synthetic methodologies that are well known and clear to the skilled artisan (Ausubel, F. M. et al, Current Protocols in Molecular Biology, 1999, John Wiley & Sons, Inc., New York; Coligan, J. E. et al, Current Protocols in Protein Science, 1999, John Wiley & Sons, Inc., New York; Molecular Cloning: A Laboratory Manual, 1989, Cold Spring Harbor Laboratory Press, Cold Spring Harbor). The polypeptide may comprise a recombinant or synthetic polypeptide that comprises at least one of SEQ ID NO:1-123 which sequences may also be present in multiple copies. Thus, oligopeptides and polypeptides of the present invention may have one, two, three, or more such immunogenic peptides within the amino acid sequence of said oligopeptides and polypeptides, and said immunogenic peptides, or epitopes, may be the same or may be different, or may have any number of such sequences wherein some of them are identical to each other in amino acid sequence while others within the same polypeptide sequence are different from each other and said epitopic sequences may occur in any order within said immunogenic polypeptide sequence. The location of such sequences within the sequence of a polypeptide forming an immunogen of the invention may affect relative immunogenic activity. In addition, immunogens of the present invention may comprise more than one protein comprising the amino acid sequences disclosed herein. Such polypeptides may be part of a single composition or may themselves be covalently or non-covalently linked to each other.

[0053] The immunogenic peptides disclosed herein may also be linked directly to, or through a spacer or linker to: an immunogenic carrier such as serum albumin, tetanus toxoid, keyhole limpet hemocyanin, dextran, or a recombinant virus particle; an immunogenic peptide known to stimulate a T helper cell type immune response; a cytokine such as interferon gamma or GMCSF; a targeting agent such as an antibody or receptor ligand; a stabilizing agent such as a lipid; or a conjugate of a plurality of epitopes to a branched lysine core structure, such as the so-called “multiple antigenic peptide” described in (Posneft, D. N. et al., J. Biol. Chem., 263:1719-1725, (1988)); a compound such as polyethylene glycol to increase the half life of the peptide; or additional amino acids such as a leader or secretory sequence, or a sequence employed for the purification of the mature sequence. Spacers and linkers typically comprise relatively small, neutral molecules, such as amino acids and which are substantially uncharged under physiological conditions. Such spacers are typically selected from the group of nonpolar or neutral polar amino acids, such as glycine, alanine, serine and other similar amino acids. Such optional spacers or linkers need not comprise the same residues and thus may be either homo- or hetero-oligomers. When present, such linkers will commonly be of length at least one or two, commonly 3, 4, 5, 6, and possibly as much as 10 or even up to 20 residues (in the case of amino acids). In addition, such linkers need not be composed of amino acids but any oligomeric structures will do as well so long as they provide the correct spacing so as to optimize the desired level of immunogenic activity of the immunogens of the present invention. The immunogen may therefore take any form that is capable of eliciting a CTL response.

[0054] In addition, the immunogenic peptides of the present invention may be part of an immunogenic structure via attachments other than conventional peptide bonds. Thus, any manner of attaching the peptides of the invention to an immunogen of the invention, such as an immunogenic polypeptide as disclosed herein, could provide an immunogenic structure as claimed herein. Thus, immunogens, such as proteins, oligopeptides and polypeptides of the invention, are structures that contain the peptides disclosed according to the present invention but such immunogenic peptides may not necessarily be attached thereto by the conventional means of using ordinary peptide bounds. The immunogens of the present invention simply contain such peptides as part of their makeup, but how such peptides are to be combined to form the final immunogen is left to the talent and imagination of the user and is in no way restricted or limited by the disclosure contained herein.

[0055] The peptides that are naturally processed and bound to a class I MHC molecule, and which are recognized by a tumor-specific CTL, need not be the optimal peptides for stimulating a CTL response. See, for example, (Parkhurst, M. R. et al., J. Immunol., 157:2539-2548, (1996); Rosenberg, S. A. et al., Nat. Med., 4:321-327, (1998)). Thus, there can be utility in modifying a peptide, such that it more readily induces a CTL response. Generally, peptides may be modified at two types of positions. The peptides may be modified at amino acid residues that are predicted to interact with the class I MHC molecule, in which case the goal is to create a peptide that has a higher affinity for the class I MHC molecule than does the original peptide. The peptides can also be modified at amino acid residues that are predicted to interact with the T cell receptor on the CTL, in which case the goal is to create a peptide that has a higher affinity for the T cell receptor than does the original peptide. Both of these types of modifications can result in a variant peptide that is related to an original peptide, but which is better able to induce a CTL response than is the original peptide. As used herein, the term “original peptide” means an oligopeptide with the amino acid sequence selected from SEQ ID NO: 1-123.

[0056] The original peptides disclosed herein can be modified by the substitution of one or more residues at different, possibly selective, sites within the peptide chain. Such substitutions may be of a conservative nature, for example, where one amino acid is replaced by an amino acid of similar structure and characteristics, such as where a hydrophobic amino acid is replaced by another hydrophobic amino acid. Even more conservative would be replacement of amino acids of the same or similar size and chemical nature, such as where leucine is replaced by isoleucine. In studies of sequence variations in families of naturally occurring homologous proteins, certain amino acid substitutions are more often tolerated than others, and these often show correlation with similarities in size, charge, polarity, and hydrophobicity between the original amino acid and its replacement, and such is the basis for defining “conservative substitutions.”

[0057] Conservative substitutions are herein defined as exchanges within one of the following five groups: Group 1—small aliphatic, nonpolar or slightly polar residues (Ala, Ser, Thr, Pro, Gly); Group 2—polar, negatively charged residues and their amides (Asp, Asn, Glu, Gln); Group 3—polar, positively charged residues (His, Arg, Lys); Group 4—large, aliphatic, nonpolar residues (Met, Leu, Ile, Val, Cys); and Group 4—large, aromatic residues (Phe, Tyr, Trp).

[0058] Less conservative substitutions might involve the replacement of one amino acid by another that has similar characteristics but is somewhat different in size, such as replacement of an alanine by an isoleucine residue. Highly nonconservative replacements might involve substituting an acidic amino acid for one that is polar, or even for one that is basic in character. Such radical substitutions cannot, however, be dismissed as potentially ineffective since chemical effects are not totally predictable and radical substitutions might well give rise to serendipitous effects not otherwise predictable from simple chemical principles.

[0059] Of course, such substitutions may involve structures other than the common L-amino acids. Thus, D-amino acids might be substituted for the L-amino acids commonly found in the antigenic peptides of the invention and yet still be encompassed by the disclosure herein. In addition, amino acids possessing non-standard R groups (i.e., R groups other than those found in the common 20 amino acids of natural proteins) may also be used for substitution purposes to produce immunogens and immunogenic polypeptides according to the present invention.

[0060] If substitutions at more than one position are found to result in a peptide with substantially equivalent or greater antigenic activity as defined below, then combinations of those substitutions will be tested to determine if the combined substitutions result in additive or syngeneic effects on the antigenicity of the peptide. At most, no more than 4 positions within the peptide would simultaneously be substituted.

[0061] Based on cytotoxicity assays, an epitope is considered substantially identical to the reference peptide if it has at least 10% of the antigenic activity of the reference peptide as defined by the ability of the substituted peptide to reconstitute the epitope recognized by a CTL in comparison to the reference peptide. Thus, when comparing the lytic activity in the linear portion of the effector:target curves with equimolar concentrations of the reference and substituted peptides, the observed percent specific killing of the target cells incubated with the substituted peptide should be equal to that of the reference peptide at an effector:target ratio that is no greater than 10-fold above the reference peptide effector:target ratio at which the comparison is being made.

[0062] Preferably, when the CTLs specific for a peptide of SEQ ID NO:1-123 are tested against the substituted peptides, the peptide concentration at which the substituted peptides achieve half the maximal increase in lysis relative to background is no more than about 1 mM, preferably no more than about 1 μM, more preferably no more than about 1 nM, and still more preferably no more than about 100 pM, and most preferably no more than about 10 pM. It is also preferred that the substituted peptide be recognized by CTLs from more than one individual, at least two, and more preferably three individuals.

[0063] Thus, the epitopes of the present invention may be identical to naturally occurring tumor-associated or tumor-specific epitopes or may include epitopes that differ by no more than 4 residues from the reference peptide, as long as they have substantially identical antigenic activity.

[0064] It should be appreciated that an immunogen may consist only of a peptide of SEQ ID NO:1-123, or comprise a peptide of SEQ ID NO:1-123, or comprise a plurality of peptides selected from SEQ ID NO:1-123, or comprise a polypeptide that itself comprises one or more of the epitopic peptides of SEQ ID NO: 1-123.

[0065] The immunogenic peptides and polypeptides of the invention can be prepared synthetically, by recombinant DNA technology, or they can be isolated from natural sources such as tumor cells expressing the original protein product.

[0066] The polypeptides and oligopeptides disclosed herein can be synthesized in solution or on a solid support in accordance with conventional techniques. Various automated peptide synthesizers are commercially available and can be used in accordance with known protocols. See, for example, (Grant, G. A., Synthetic Peptides: A User's Guide, 1992, W. H. Freeman and Company, New York; Coligan, J. E. et al, Current Protocols in Protein Science, 1999, John Wiley & Sons, Inc., New York). Fragments of polypeptides of the invention can also be synthesized as intermediates in the synthesis of a larger polypeptide.

[0067] Recombinant DNA technology may be employed wherein a nucleotide sequence that encodes an immunogenic peptide or polypeptide of interest is inserted into an expression vector, transformed or transfected into an appropriate host cell, and cultivated under conditions suitable for expression. These procedures are well known in the art to the skilled artisan, as described in (Coligan, J. E. et al, Current Protocols in Immunology, 1999, John Wiley & Sons, Inc., New York; Ausubel, F. M. et al, Current Protocols in Molecular Biology, 1999, John Wiley & Sons, Inc., New York; Molecular Cloning: A Laboratory Manual, 1989, Cold Spring Harbor Laboratory Press, Cold Spring Harbor). Thus, recombinantly produced peptides or polypeptides can be used as the immunogens of the invention.

[0068] The coding sequences for peptides of the length contemplated herein can be synthesized on commercially available automated DNA synthesizers using protocols that are well know in the art. See for example, (Grant, G. A., Synthetic Peptides: A User's Guide, 1992, W. H. Freeman and Company, New York; Coligan, J. E. et al, Current Protocols in Protein Science, 1999, John Wiley & Sons, Inc., New York). The coding sequences can also be modified such that a peptide or polypeptide will be produced that incorporates a desired amino acid substitution. The coding sequence can be provided with appropriate linkers, be ligated into suitable expression vectors that are commonly available in the art, and the resulting DNA or RNA molecule can be transformed or transfected into suitable hosts to produce the desired fusion protein. A number of such vectors and suitable host systems are available, and their selection is left to the skilled artisan. For expression of the fusion proteins, the coding sequence will be provided with operably linked start and stop codons, promoter and terminator regions, and a replication system to provide an expression vector for expression in the desired host cell. For example, promoter sequences compatible with bacterial hosts are provided in plasmids containing convenient restriction sites for insertion of the desired coding sequence. The resulting expression vectors are transformed into suitable bacterial hosts. Yeast, insect, and mammalian host cells may also be used, employing suitable vectors and control sequences.

[0069] Host cells are genetically engineered (transduced or transformed or transfected) with the vectors of this invention which may be, for example, a cloning vector or an expression vector. The vector may be, for example, in the form of a plasmid, a viral particle, a phage, etc. The engineered host cells can be cultured in conventional nutrient media modified as appropriate for activating promoters, selecting transformants or amplifying the genes of the present invention. The culture conditions, such as temperature, pH and the like, are those previously used with the host cell selected for expression, and will be apparent to the ordinarily skilled artisan.

[0070] More particularly, the present invention also includes recombinant constructs comprising one or more of the sequences as broadly described above. The constructs comprise a vector, such as a plasmid or viral vector, into which a sequence of the invention has been inserted, in a forward or reverse orientation. In a preferred aspect of this embodiment, the construct further comprises regulatory sequences, including, for example, a promoter, operably linked to the sequence. Large numbers of suitable vectors and promoters are known to those of skill in the art, and are commercially available.

[0071] In a further embodiment, the present invention relates to host cells containing the above-described constructs. The host cell can be a higher eukaryotic cell, such as a mammalian cell, or a lower eukaryotic cell, such as a yeast cell, or the host cell can be a prokaryotic cell, such as a bacterial cell. Introduction of the construct into the host cell can be effected by calcium phosphate transfection, DEAE-Dextran mediated transfection, or electroporation (Ausubel, F. M. et al, Current Protocols in Molecular Biology, 1999, John Wiley & Sons, Inc., New York; Molecular Cloning: A Laboratory Manual, 1989, Cold Spring Harbor Laboratory Press, Cold Spring Harbor). Such cells can routinely be utilized for assaying CTL activity by having said genetically engineered, or recombinant, host cells express the immunogenic peptides of the present invention.

[0072] Various mammalian cell culture systems can also be employed to express recombinant protein. Examples of mammalian expression systems include the COS-7 lines of monkey kidney fibroblasts, described by Gluzman, Cell, 23:175 (1981), and other cell lines capable of expressing a compatible vector, for example, the C127, 3T3, CHO, HeLa and BHK cell lines. Mammalian expression vectors will comprise an origin of replication, a suitable promoter and enhancer, and also any necessary ribosome binding sites, polyadenylation site, splice donor and acceptor sites, transcriptional termination sequences, and 5′ flanking non-transcribed sequences. DNA sequences derived from the SV40 splice, and polyadenylation sites may be used to provide the required nontranscribed genetic elements.

[0073] The polypeptide can be recovered and purified from recombinant cell cultures by methods including ammonium sulfate or ethanol precipitation, acid extraction, anion or cation exchange chromatography, phosphocellulose chromatography, hydrophobic interaction chromatography, affinity chromatography, hydroxylapatite chromatography and lectin chromatography. Protein refolding steps can be used, as necessary, in completing configuration of the mature protein. High performance liquid chromatography (HPLC) can be employed for final purification steps.

[0074] The immunogenic peptides of the present invention may be used to elicit CTLs ex vivo from either healthy individuals or from cancer patients, such as breast carcinoma, colorectal carcinoma, lung carcinoma, ovarian carcinoma, or prostate carcinoma. Such responses are induced by incubating in tissue culture the individual's CTL precursor lymphocytes together with a source of antigen presenting cells and the appropriate immunogenic peptide. Examples of suitable antigen presenting cells include dendritic cells, macrophages, and activated B cells. Typically, the peptide at concentrations between 10 and 40 μg/ml, would be pre-incubated with the antigen presenting cells for periods ranging from 1 to 18 hrs. β₂-microglobulin (4 μg/ml) can be added during this time period to enhance binding. The antigen presenting cells may also be held at room temperature during the incubation period (Ljunggren, H.-G. et al., Nature, 346:476-480, (1990)) or pretreated with acid (Zeh, H. J., III et al., Hum. Immunol., 39:79-86, (1994)) to promote the generation of denatured class I MHC molecules that can then bind the peptide. The precursor CTLs (responders) are then added to the antigen presenting cells to which the immunogenic peptide has bound (stimulators) at responder to stimulator ratios of between 5:1 and 50:1, and most typically between 10:1 and 20:1. The co-cultivation of the cells is carried out at 37° C. in RPMI 1640, 10% fetal bovine serum, 2 mM L-glutamine, and IL-2 (5-20 Units/ml). Other cytokines, such as IL-1, IL-7, and IL-12 may also be added to the culture. Fresh IL-2-containing media is added to the cultures every 2-4 days, typically by removing one-half the old media and replenishing it with an equal volume of fresh media. After 7-10 days, and every 7-10 days thereafter, the CTL are re-stimulated with antigen presenting cells to which immunogenic peptide has been bound as described above. Fresh IL-2-containing media is added to the cells throughout their culture as described above. Three to four rounds of stimulation, and sometimes as many five to eight rounds of stimulation, are required to generate a CTL response that can then be measured in vitro. The above described protocol is illustrative only and should not be considered limiting. Many in vitro CTL stimulation protocols have been described and the choice of which one to use is well within the knowledge of the skilled artisan. The peptide-specific CTL can be further expanded to large numbers by treatment with anti-CD3 antibody. For example, see (Riddell, S. R. and Greenberg, P. D., J. Immunol. Methods, 128:189-201, (1990); Walter, E. A. et al., N. Engl. J. Med., 333:1038-1044, (1995)).

[0075] Antigen presenting cells that are to be used to stimulate a CTL response are typically incubated with peptide of an optimal length, for example a nonapeptide, that allows for direct binding of the peptide to the class I MHC molecule without additional processing. Larger oligopeptides and polypeptides are generally ineffective in binding to class I MHC molecules as they are not efficiently processed into an appropriately sized peptide in the extracellular milieu. A variety of approaches are known in the art, however, that allow oligopeptides and polypeptides to be exogenously acquired by a cell, which then allows for their subsequent processing and presentation by a class I MHC molecule. Representative, but non-limiting examples of such approaches include electroporation of the molecules into the cell (Harding, C. H. III, Eur. J. Immunol., 22:1865-1869, (1992)), encapsulation of the molecules in liposomes that are fused to the cells of interest (Reddy, R. et al., J. Immunol. Methods, 141:157-163, (1991)), or osmotic shock in which the molecules are taken up via pinocytosis (Moore, M. W. et al., Cell, 54:777-785, (1988)). Thus, oligopeptides and polypeptides that comprise one or more of the peptides of the invention can be provided to antigen presenting cells in such a fashion that they are delivered to the cytoplasm of the cell, and are subsequently processed to allow presentation of the peptides.

[0076] Antigen presenting cells suitable for stimulating an in vitro CTL response that is specific for one or more of the peptides of the invention can also be prepared by introducing polynucleotide vectors encoding the sequences into the cells. These polynucleotides can be designed such that they express only a single peptide of the invention, multiple peptides of the invention, or even a plurality of peptides of the invention. A variety of approaches are known in the art that allow polynucleotides to be introduced and expressed in a cell, thus providing one or more peptides of the invention to the class I MHC molecule binding pathway. Representative, but non-limiting examples of such approaches include the introduction of plasmid DNA through particle-mediated gene transfer or electroporation (Tuting, T. et al., J. Immunol., 160:1139-1147, (1998)), or the transduction of cells with an adenovirus expressing the polynucleotide of interest (Perez-Diez, A. et al., Cancer Res., 58:5305-5309, (1998)). Thus, oligonucleotides that code for one or more of the peptides of the invention can be provided to antigen presenting cells in such a fashion that the peptides associate with class I MHC molecules and are presented on the surface of the antigen presenting cell, and consequently are available to stimulate a CTL response.

[0077] By preparing the stimulator cells used to generate an in vitro CTL response in different ways, it is possible to control the peptide specificity of CTL response. For example, the CTLs generated with a particular peptide will necessarily be specific for that peptide. Likewise, CTLs that are generated with a polypeptide or polynucleotide expressing or coding for particular peptides will be limited to specificities that recognize those peptides. More broadly, stimulator cells, and more specifically dendritic cells, can be incubated in the presence of the whole parent protein. As a further alternative, stimulator cells, and more specifically dendritic cells, can be transduced or transfected with RNA or DNA comprising the polynucleotide sequence encoding the protein. Under these alternative conditions, peptide epitopes that are naturally cleaved out of the protein, and which are generated in addition to peptide epitopes of SEQ ID NO:1-123 can associate with an appropriate class I MHC molecule, which may or may not include HLA-A1, -A2, -A3. The selection of antigen presenting cells and the type of antigen with which to stimulate the CTL, is left to the ordinary skilled artisan.

[0078] In certain embodiments, the methods of the present invention include a method for inducing a CTL response in vitro that is specific for a tumor cell expressing a molecule from A1, A2, or A3 supertypes (A11 is a member of the A3 supertype), whereby the method comprises contacting a CTL precursor lymphocyte with an antigen presenting cell that has bound an immunogen comprising one or more of the peptides disclosed according to the invention.

[0079] In specific embodiments, the methods of the present invention include a method for inducing a CTL response in vitro that is specific for a tumor cell expressing a molecule from A1, A2, or A3 supertypes, whereby the method comprises contacting a CTL precursor lymphocyte with an antigen presenting cell that has exogenously acquired an immunogenic oligopeptide or polypeptide that comprises one or more of the peptides disclosed according to the invention.

[0080] A yet additional embodiment of the present invention is directed to a process for inducing a CTL response in vitro that is specific for a tumor cell expressing a molecule from A1, A2, or A3 supertypes, comprising contacting a CTL precursor lymphocyte with an antigen presenting cell that is expressing a polynucleotide coding for a polypeptide of the invention and wherein said polynucleotide is operably linked to a promoter.

[0081] A variety of techniques exist for assaying the activity of CTL. These techniques include the labeling of target cells with radionuclides such as Na₂⁵¹Cr0₄ or ³H-thymidine, and measuring the release or retention of the radionuclides from the target cells as an index of cell death. Such assays are well-known in the art and their selection is left to the skilled artisan. Alternatively, CTL are known to release a variety of cytokines when they are stimulated by an appropriate target cell, such as a tumor cell expressing the relevant class I MHC molecule and the corresponding peptide. Non-limiting examples of such cytokines include IFN-γ, TNF-α, and GM-CSF. Assays for these cytokines are well known in the art, and their selection is left to the skilled artisan. Methodology for measuring both target cell death and cytokine release as a measure of CTL reactivity are given in Coligan, J. E. et al. (Current Protocols in Immunology, 1999, John Wiley & Sons, Inc., New York).

[0082] After expansion of the antigen-specific CTLs, the latter are then adoptively transferred back into the patient, where they will destroy their specific target cell. The utility of such adoptive transfer is demonstrated in North, R. J. et al. (Infect. Immun., 67:2010-2012, (1999)) and Riddell, S. R. et al. (Science, 257:238-241, (1992)). In determining the amount of cells to reinfuse, the skilled physician will be guided by the total number of cells available, the activity of the CTL as measured in vitro, and the condition of the patient. Preferably, however, about 1×10⁶ to about 1×10¹², more preferably about 1×10⁸ to about 1×10¹¹, and even more preferably, about 1×10⁹ to about 1×10¹⁰ peptide-specific CTL are infused. Methodology for reinfusing T cells into a patient are well known and exemplified in U.S. Pat. No. 4,844,893 to Honski, et al., and U.S. Pat. No. 4,690,915 to Rosenberg.

[0083] The peptide-specific CTL can be purified from the stimulator cells prior to infusion into the patient. For example, monoclonal antibodies directed toward the cell surface protein CD8, present on CTL, can be used in conjunction with a variety of isolation techniques such as antibody panning, flow cytometric sorting, and magnetic bead separation to purify the peptide-specific CTL away from any remaining non-peptide specific lymphocytes or from the stimulator cells. These methods are well known in the art, and their selection is left to the skilled artisan. It should be appreciated that generation of peptide-specific CTL in this manner obviates the need for stimulating the CTL in the presence of tumor. Thus, there is no chance of inadvertently reintroducing tumor cells into the patient.

[0084] Thus, one embodiment of the present invention relates to a process for treating a subject with cancer characterized by tumor cells expressing complexes of a molecule from A1, A2, or A3 supertypes, for example, HLA-A1, HLA-A2, or HLAA11, whereby CTLs produced in vitro according to the present invention are administered in an amount sufficient to destroy the tumor cells through direct lysis or to effect the destruction of the tumor cells indirectly through the elaboration of cytokines.

[0085] Another embodiment of the present invention is directed to a process for treating a subject with cancer characterized by tumor cells expressing any class I MHC molecule and an epitope of SEQ ID NO: 1-123, whereby the CTLs are produced in vitro and are specific for the epitope or original protein and are administered in an amount sufficient to destroy the tumor cells through direct lysis or to effect the destruction of the tumor cells indirectly through the elaboration of cytokines.

[0086] In the foregoing embodiments the cancer to be treated may include a breast carcinoma, a colorectal carcinoma, an ovarian carcinoma, a lung carcinoma, and prostate carcinoma, but especially breast carcinoma.

[0087] The ex vivo generated CTL can be used to identify and isolate the T cell receptor molecules specific for the peptide. The genes encoding the alpha and beta chains of the T cell receptor can be cloned into an expression vector system and transferred and expressed in naive T cells from peripheral blood, T cells from lymph nodes, or T lymphocyte progenitor cells from bone marrow. These T cells, which would then be expressing a peptide-specific T cell receptor, would then have anti-tumor reactivity and could be used in adoptive therapy of cancer, and more specifically cancer, breast carcinoma, colorectal carcinoma, ovarian carcinoma, lung carcinoma, and prostate carcinoma.

[0088] In addition to their use for therapeutic or prophylactic purposes, the immunogenic peptides of the present invention are useful as screening and diagnostic agents. Thus, the immunogenic peptides of the present invention, together with modern techniques of gene screening, make it possible to screen patients for the presence of genes encoding such peptides on cells obtained by biopsy of tumors detected in such patients. The results of such screening may help determine the efficacy of proceeding with the regimen of treatment disclosed herein using the immunogens of the present invention.

[0089] Alternatively, the immunogenic peptides disclosed herein, as well as functionally similar homologs thereof, may be used to screen a sample for the presence of CTLs that specifically recognize the corresponding epitopes. The lymphocytes to be screened in this assay will normally be obtained from the peripheral blood, but lymphocytes can be obtained from other sources, including lymph nodes, spleen, tumors, and pleural fluid. The peptides of the present invention may then be used as a diagnostic tool to evaluate the efficacy of the immunotherapeutic treatments disclosed herein. Thus, the in vitro generation of CTL as described above would be used to determine if patients are likely to respond to the peptide in vivo. Similarly, the in vitro generation of CTL could be done with samples of lymphocytes obtained from the patient before and after treatment with the peptides. Successful generation of CTL in vivo should then be recognized by a correspondingly easier ability to generate peptide-specific CTL in vitro from lymphocytes obtained following treatment in comparison to those obtained before treatment.

[0090] The oligopeptides of the invention, such as SEQ ID NO: 1-123, can also be used to prepare class I MHC tetramers which can be used in conjunction with flow cytometry to quantitate the frequency of peptide-specific CTL that are present in a sample of lymphocytes from an individual. Specifically, for example, class I MHC molecules comprising peptides of SEQ ID NO: 1-123, would be combined to form tetramers as exemplified in U.S. Pat. No. 5,635,363. Said tetramers would find use in monitoring the frequency of CTLs in the peripheral blood, lymph nodes, or tumor mass of an individual undergoing immunotherapy with the peptides, proteins, or polynucleotides of the invention, and it would be expected that successful immunization would lead to an increase in the frequency of the peptide-specific CTL.

[0091] As stated above, a vaccine in accordance with the present invention may include one or more of the hereinabove described polypeptides or active fragments thereof, or a composition, or pool, of immunogenic peptides disclosed herein. When employing more than one polypeptide or active fragment, such as two or more polypeptides and/or active fragments may be used as a physical mixture or as a fusion of two or more polypeptides or active fragments. The fusion fragment or fusion polypeptide may be produced, for example, by recombinant techniques or by the use of appropriate linkers for fusing previously prepared polypeptides or active fragments.

[0092] The immunogenic molecules of the invention, including vaccine compositions, may be utilized according to the present invention for purposes of preventing, suppressing or treating diseases causing the expression of the immunogenic peptides disclosed herein, such as where the antigen is being expressed by tumor cells. As used in accordance with the present invention, the term “prevention” relates to a process of prophylaxis in which an animal, especially a mammal, and most especially a human, is exposed to an immunogen of the present invention prior to the induction or onset of the disease process. This could be done where an individual has a genetic pedigree indicating a predisposition toward occurrence of the disease condition to be prevented. For example, this might be true of an individual whose ancestors show a predisposition toward certain types of cancer. Alternatively, the immunogen could be administered to the general population as is frequently done for infectious diseases. Alternatively, the term “suppression” is often used to describe a condition wherein the disease process has already begun but obvious symptoms of said condition have yet to be realized. Thus, the cells of an individual may have become cancerous but no outside signs of the disease have yet been clinically recognized. In either case, the term prophylaxis can be applied to encompass both prevention and suppression. Conversely, the term “treatment” is often utilized to mean the clinical application of agents to combat an already existing condition whose clinical presentation has already been realized in a patient. This would occur where an individual has already been diagnosed as having a tumor.

[0093] It is understood that the suitable dosage of an immunogen of the present invention will depend upon the age, sex, health, and weight of the recipient, the kind of concurrent treatment, if any, the frequency of treatment, and the nature of the effect desired. However, the most preferred dosage can be tailored to the individual subject, as determined by the researcher or clinician. The total dose required for any given treatment will commonly be determined with respect to a standard reference dose as set by a manufacturer, such as is commonly done with vaccines, such dose being administered either in a single treatment or in a series of doses, the success of which will depend on the production of a desired immunological result (i.e., successful production of a CTL-mediated response to the antigen, which response gives rise to the prevention and/or treatment desired). Thus, the overall administration schedule must be considered in determining the success of a course of treatment and not whether a single dose, given in isolation, would or would not produce the desired immunologically therapeutic result or effect.

[0094] The therapeutically effective amount of a composition containing one or more of the immunogens of this invention, is an amount sufficient to induce an effective CTL response to cure or arrest disease progression. Thus, this dose will depend, among other things, on the identity of the immunogens used, the nature of the disease condition, the severity of the disease condition, the extent of any need to prevent such a condition where it has not already been detected, the manner of administration dictated by the situation requiring such administration, the weight and state of health of the individual receiving such administration, and the sound judgment of the clinician or researcher. Thus, for purposes of prophylactic or therapeutic administration, effective amounts would generally lie within the range of from 1.0 μg to about 5,000 μg of peptide for a 70 kg patient, followed by boosting dosages of from about 1.0 μg to about 1,000 μg of peptide pursuant to a boosting regimen over days, weeks or months, depending on the recipient's response and as necessitated by subsequent monitoring of CTL-mediated activity within the bloodstream. Of course, such dosages are to be considered only a general guide and, in a given situation, may greatly exceed such suggested dosage regimens where the clinician believes that the recipient's condition warrants more aggressive administration schedule. The efficacy of administering additional doses, and of increasing or decreasing the interval, may be re-evaluated on a continuing basis, in view of the recipient's immunocompetence (for example, the level of CTL activity with respect to tumor-associated or tumor-specific antigens).

[0095] For such purposes, the immunogenic compositions according to the present invention may be used against a disease condition such as cancer by administration to an individual by a variety of routes. The composition may be administered parenterally or orally, and, if parenterally, either systemically or topically. Parenteral routes include subcutaneous, intravenous, intradermal, intramuscular, intraperitoneal, intranasal, transdermal, or buccal routes. One or more such routes may be employed. Parenteral administration can be, for example, by bolus injection or by gradual perfusion over time.

[0096] Generally, vaccines are prepared as injectables, in the form of aqueous solutions or suspensions. Vaccines in an oil base are also well known such as for inhaling. Solid forms that are dissolved or suspended prior to use may also be formulated. Pharmaceutical carriers, diluents and excipients are generally added that are compatible with the active ingredients and acceptable for pharmaceutical use. Examples of such carriers include, but are not limited to, water, saline solutions, dextrose, or glycerol. Combinations of carriers may also be used. These compositions may be sterilized by conventional, well known sterilization techniques including sterile filtration. The resulting solutions may be packaged for use as is, or the aqueous solutions may be lyophilized, the lyophilized preparation being combined with sterile water before administration. Vaccine compositions may further incorporate additional substances to stabilize pH, or to function as adjuvants, wetting agents, or emulsifying agents, which can serve to improve the effectiveness of the vaccine.

[0097] The concentration of the CTL stimulatory peptides of the invention in pharmaceutical formulations are subject to wide variation, including anywhere from less than 0.01% by weight to as much as 50% or more. Factors such as volume and viscosity of the resulting composition must also be considered. The solvents, or diluents, used for such compositions include water, dimethylsulfoxide, PBS (phosphate buffered saline), or saline itself, or other possible carriers or excipients.

[0098] The immunogens of the present invention may also be contained in artificially created structures such as liposomes, ISCOMS, slow-releasing particles, and other vehicles which increase the immunogenicity and/or half-life of the peptides or polypeptides in serum. Liposomes include emulsions, foams, micelles, insoluble monolayers, liquid crystals, phospholipid dispersions, lamellar layers and the like. Liposomes for use in the invention are formed from standard vesicle-forming lipids which generally include neutral and negatively charged phospholipids and a sterol, such as cholesterol. The selection of lipids is generally determined by considerations such as liposome size and stability in the blood. A variety of methods are available for preparing liposomes as reviewed, for example, by (Coligan, J. E. et al, Current Protocols in Protein Science, 1999, John Wiley & Sons, Inc., New York) and see also U.S. Pat. Nos. 4,235,871, 4,501,728, 4,837,028, and 5,019,369. Liposomes containing the peptides or polypeptides of the invention can be directed to the site of lymphoid cells where the liposomes then deliver the selected immunogens directly to antigen presenting cells. Targeting can be achieved by incorporating additional molecules such as proteins or polysaccharides into the outer membranes of said structures, thus resulting in the delivery of the structures to particular areas of the body, or to particular cells within a given organ or tissue. Such targeting molecules may a molecule that binds to receptor on antigen presenting cells. For example an antibody that binds to CD80 could be used to direct liposomes to dendritic cells.

[0099] The immunogens of the present invention may also be administered as solid compositions. Conventional nontoxic solid carriers including pharmaceutical grades of mannitol, lactose, starch, magnesium, cellulose, glucose, sucrose, sodium saccharin, and the like. Such solid compositions will often be administered orally, whereby a pharmaceutically acceptable nontoxic composition is formed by incorporating the peptides and polypeptides of the invention with any of the carriers listed above. Generally, such compositions will contain 10-95% active ingredient, and more preferably 25-75% active ingredient.

[0100] Aerosol administration is also an alternative, requiring only that the immunogens be properly dispersed within the aerosol propellant. Typical percentages of the peptides or polypeptides of the invention are 0.01%-20% by weight, preferably 1%-10%. The use of a surfactant to properly disperse the immunogen may be required. Representative surfactants include the esters or partial esters of fatty acids containing from 6 to 22 carbon atoms, such as caproic, octanoic, lauric, palmitic, stearic, linoleic, linolenic, olesteric and oleic acids with an aliphatic polyhydric alcohol or its cyclic anhydride. Mixed esters, such as mixed or natural glycerides may be employed. The surfactant may constitute 0.1-20% by weight of the composition, preferably 0.25-5%. Typical propellants for such administration may include esters and similar chemicals but are by no means limited to these. A carrier, such as lecithin for intranasal delivery, may also be included.

[0101] The peptides and polypeptides of the invention may also be delivered with an adjuvant. Adjuvants include, but are not limited to, complete or incomplete Freund's adjuvant, Montanide ISA-51, Activation Gene-3 (LAG-3), aluminum phosphate, aluminum hydroxide, alum, and saponin. Adjuvant effects can also be obtained by injecting a variety of cytokines along with the immunogens of the invention. These cytokines include, but are not limited to IL-1, IL-2, IL-7, IL-12, and GM-CSF.

[0102] The peptides and polypeptides of the invention can also be added to professional antigen presenting cells such as dendritic cells that have been prepared ex vivo. For example, the dendritic cells could be prepared from CD34 positive stem cells from the bone marrow, or they could be prepared from CD14 positive monocytes obtained from the peripheral blood. The dendritic cells are generated ex vivo using cytokines such as GM-CSF, IL-3, IL-4, TNF, and SCF. The cultured DC are then pulsed with peptides at various concentrations using standard methods that are well known in the art. The peptide-pulsed dendritic cells can then be administered either intravenously, subcutaneously, or intradermally, and the immunization may also include cytokines such as IL-2 or IL-12.

[0103] The present invention is also directed to a vaccine in which an immunogen of the present invention is delivered or administered in the form of a polynucleotide encoding the a polypeptide or active fragment as disclosed herein, whereby the peptide or polypeptide or active fragment is produced in vivo. The polynucleotide may be included in a suitable expression vector and combined with a pharmaceutically acceptable carrier. For example, the peptides or polypeptides could be expressed in plasmid DNA and nonreplicative viral vectors such as vaccinia, fowlpox, Venezuelan equine encephalitis virus, adenovirus, or other RNA or DNA viruses. These examples are meant to be illustrative only and should not be viewed as self-limiting. A wide variety of other vectors is available and are apparent to those skilled in the art from the description given herein. In this approach, a portion of the nucleotide sequence of the viral vector is engineered to express the peptides or polypeptides of the invention. Vaccinia vectors and methods useful in immunization protocols are described in U.S. Pat. No. 4,722,848, the disclosure of which is incorporated herein by reference in its entirety.

[0104] Regardless of the nature of the composition given, additional therapeutic agents may also accompany the immunogens of the present invention. Thus, for purposes of treating tumors, compositions containing the immunogens disclosed herein may, in addition, contain other antitumor pharmaceuticals. The use of such compositions with multiple active ingredients is left to the discretion of the clinician.

[0105] In addition, the immunogens of the present invention can be used to stimulate the production of antibodies for use in passive immunotherapy, for use as diagnostic reagents, and for use as reagents in other processes such as affinity chromatography.

[0106] The present invention also relates to antibodies that react with immunogens, such as a polypeptide comprising one or more of the epitopic peptides of SEQ ID NO: 1-123 as disclosed herein. Active fragments of such antibodies are also specifically contemplated. Such antibodies, and active fragments of such antibodies, for example, and Fab structure, may react with, including where it is highly selective or specific for, an immunogenic structure comprising 2, 3, 4 or more of the epitopic peptides of the invention.

[0107] With the advent of methods of molecular biology and recombinant technology, it is now possible for the artisan or ordinary skill to produce antibody molecules by recombinant means and thereby generate gene sequences that code for specific amino acid sequences found in the polypeptide structure of the antibodies. Such antibodies can be produced by either cloning the gene sequences encoding the polypeptide chains of said antibodies or by direct synthesis of said polypeptide chains, with in vitro assembly of the synthesized chains to form active tetrameric (H₂L₂) structures with affinity for specific epitopes and antigenic determinants. This has permitted the ready production of antibodies having sequences characteristic of neutralizing antibodies from different species and sources.

[0108] Regardless of the source of the antibodies or nanobodies, or how the artisan of ordinary skill chooses to produce such antibodies or nanobodies, including recombinantly constructed or synthesized, in vitro or in vivo, by using transgenic animals, such as cows, goats and sheep, or by using cell cultures in bioreactors, or by direct chemical synthesis employing no living organisms at any stage of the process, all antibodies and nanobodies have regions capable of interacting with a structurally complementary antigenic target. The regions interacting with the target are referred to as “variable” or “V” regions and are characterized by differences in amino acid sequence from antibodies of different antigenic specificity.

[0109] The antibodies disclosed according to the invention may also be wholly synthetic, wherein the polypeptide chains of the antibodies are synthesized and, possibly, optimized for binding to the polypeptides disclosed herein as being receptors. Such antibodies may be chimeric or humanized antibodies and may be fully tetrameric in structure, or may be dimeric and comprise only a single heavy and a single light chain. Such antibodies may also include fragments, such as Fab and F(ab₂)′ fragments, capable of reacting with and binding to any of the polypeptides disclosed herein as being receptors.

[0110] A further embodiment of the present invention relates to a method for inducing a CTL response in a subject comprising administering to subjects that express HLA A1, A2 or A3 supertype antigens an effective (i.e., CTL-stimulating amount) of an immunogen of the invention that does not comprise the entire protein expressing the epitopic peptides disclosed herein (i.e., one that comprises less than the entire protein where the protein is a naturally occurring polypeptide) in an amount sufficient to induce a CTL response to tumor cells expressing at least HLA-A1 or HLA-A2, as the case may be, thereby eliciting a cellular response against said tumor cells.

[0111] A still further embodiment of the present invention relates to a method for inducing a CTL response in a subject, wherein the immunogen is in the form of a polynucleotide. In one non-limiting example, the method comprises administering to subjects that express HLA-A2 at least one CTL epitope, wherein said epitope or epitopes are selected from a group comprising the peptides disclosed according to the invention, and are coded within a polynucleotide sequence that does not comprise the entire protein coding region, in an amount sufficient to induce a CTL response to tumor cells expressing HLA-A2.

[0112] While the examples are provided below to illustrate the invention, it is to be understood that these methods and examples in no way limit the invention to the embodiments described herein and that other embodiments and uses will no doubt suggest themselves to those skilled in the art. All publications, patents, and patent applications cited herein are hereby incorporated by reference, as are the references cited therein. It is also to be understood that throughout this disclosure where the singular is used, the plural may be inferred and vice versa and use of either is not to be considered limiting.

### EXAMPLE 1

### Cell Lines

[0113] MDA-mb-231 (HLA-A2, A24), a mammary gland ductal carcinoma cell line established from a pleural effusion, was obtained from ATCC (Manassas, Va.) and cultured according to the ATCC protocol. The cell line SKOV3.A2 is an HLA-A2.1 transfectant of the original ATCC (Manassas, Va.) ovarian adenocarcinoma line SKOV3 (HLA-A3, 68, B18, 35, Cw5, -) and was obtained from Dr Constantin Ioannides (M. D. Anderson Cancer Center, Houston, Tex.). A second ovarian cancer cell line OVCAR3 (HLA-A2, 29 B7, 58) was procured from ATCC. Both cell lines were cultured according to methods described in Ramakrishna, V. et al. 2003 International Immunology 15(6):751-763.

### EXAMPLE 2

### Immunoaffinity Purification

[0114] All tumor lines were maintained in RPMI 1640 medium containing 10% heat-inactivated FBS, 2 mM L-glutamine, 10 mM HEPES, penicillin (100 U/ml)-streptomycin (50 μg/ml) solution and 1% sodium pyruvate solution (all from Sigma, St Louis, Mo.). The SKOV3.A2 cell line was continuously maintained in 250 μg/ml G418 (Invitrogen). The cells were harvested by treatment with 0.45% trypsin and 0.32 mM EDTA, washed two times in phosphate-buffered saline solution (pH 7.4), and stored as cell pellets at −80° C. Aliquots of 6-8×10¹⁰ cells were solubilized at 5−10×10⁶ cells/ml in 20 mM Tris, pH 8.0, 150 mM NaCl, 1% CHAPS, 18.5 μg/ml iodoacetamide, 5 μg/ml aprotonin, 10 μg/ml leupeptin, 10 μg/ml pepstatin A, 5 mM EDTA, 0.2% sodium azide, and 17.4 μg/ml phenylmethylsulfonyl fluoride for 1 h. This and all subsequent steps were performed with ice-cold solutions and at 4° C. The lysates were then centrifuged at 100,000×g, the pellets discarded, and the supernatants passed through a 0.22 μm filter. The supernatants were then passed over a series of columns with the first containing Sepharose, and the second containing the HLA-A1-specific monoclonal antibody, GAP-A1, bound to a protein A-Sepharose matrix. The second column was then sequentially washed with 20 column volumes of 20 mM Tris, pH 8.0, 150 mM NaCl, 20 column volumes of 20 mM Tris, pH 8.0, 1.0 M NaCl, and 20 column volumes of 20 mM Tris, pH 8.0. The peptides were eluted from the column with 5 column volumes of 10% acetic acid. The isolated HLA-A1 molecules were then boiled for 5 min to further dissociate any bound peptide from the heavy chains. The peptides were then separated from the co-purifying class I heavy chain and β₂-microglobulin by centrifugation on a Ultrafree-CL membrane with a nominal molecular weight cut-off of 5,000 Daltons (Millipore, Bedford, Mass.).

[0115] OVCAR3 or SKOV3 cells were prepared using the same procedure as just described except that HLA-A2 molecules were prepared using HLA-A2-specific antibodies.

### EXAMPLE 3

### Peptide Fractionation

[0116] The peptide extracts were fractionated by RP-HPLC (Reversed Phase-High Performance Liquid Chromatography) using an Applied Biosystems (ABI) model 140B system. The extracts were concentrated by vacuum centrifugation from about 20 ml down to 250 μl and injected into either a Brownlee (Norwalk, Conn.) C₁₈ Aquapore column (2.1 mm×3 cm; 300 Å; 7 μm) or a Higgins (Mountain View, Calif.) C18 Haisil column (2.1 mm×4 cm; 300 Å; 5 μm). The peptides were eluted by first using a gradient of acetonitrile/0.085% TFA (trifluoroacetic acid) in 0.1% TFA/water, with the concentration of acetonitrile increasing from 0-9% (0-5 minutes), 9-36% (5-55 minutes), and 36-60% (55-62 minutes). A second dimension fractionation of combined fractions 17 and 18 from the first dimension (TFA) fraction was accomplished using the same gradient but with the substitution of HFBA (heptafluorobutyric acid) for TFA. The flow rate was 200 μl/min, and fractions were collected at 1 min (Brownlee column) or 40 second (Higgins column) intervals. A third dimension of RP-HPLC was achieved using an Eldex (Napa, Calif.) MicroPro Pump, a homemade C₁₈ microcapillary column, and an ABI model 785A UV absorbance detector. The column was prepared by packing a 27 cm bed of 10 μm C₁₈ particles in a section of 285 μm o.d./75 μm i.d. fused silica (Polymicro Technologies, Phoenix, Ariz.). Peptides in combined fractions 26 and 27 of the second dimension fraction were loaded onto this column and eluted with a gradient of acetonitrile/0.67% triethylamine acetate/water in 0.1% triethylamine acetate/water, with the concentration of acetonitrile increasing from 0-60% in 40 minutes. The flow rate was about 300 nl/min, and fractions were collected into 25 μl of water every 30 sec. In all RP-HPLC experiments, peptides were detected by monitoring UV absorbance at 214 nm.

### EXAMPLE 4

### Mass Spectrometric Analysis

[0117] The second dimension HPLC fraction was analyzed using an affluent splitter on the microcapillary HPLC column. In this experiment, the column (360 μm o.d.×100 μm i.d. with a 25 cm C₁₈ bed) was butt connected with a zero dead volume tee (Valco, Houston, Tex.) to two pieces of fused silica of different lengths (25 μm and 40 μm i.d.). Peptides were eluted with a 34 min gradient of 0-60% acetonitrile. The 25 μm capillary deposited one-fifth of the HPLC effluent into the wells of a microtiter plate for use in CTL epitope reconstitution assays, whereas the remaining four-fifths of the effluent was directed into the mass spectrometer. Ions were formed by electrospray ionization, and mass spectra were recorded by scanning between mass to charge ratios (m/z) 300 and 1400 every 1.5 seconds. Peptide sequences were determined by CAD (collision-activated dissociation) tandem mass spectrometry as described in the literature (Hunt, D. F. et al., Proc. Natl. Acad. Sci. U.S.A, 83:6233-6237, (1986)).

### EXAMPLE 5

### Homology Searches of Identified Peptide Sequences

[0118] Proteins containing peptides corresponding to the masses identified by MS were analyzed with the search algorithm, SEQUEST. Searches were carried using SwissProt, a curated human protein database http://www.expasy.org/sprot/. Table 2 describes SEQ ID NO: 1-123, which are MHC-associated peptides (active fragments) isolated from MDA-mb-231 tumor cells. Table 3 describes SEQ ID NO: 124-233, which are MHC-associated peptides (active fragments) found in one or more of the tumor cell lines MDA-mb-231 (M), OVCAR3 (O) and SKOV3.A2 (S). These tables illustrate peptides that are associated with HLA molecules, and the genes and proteins from which these peptides are derived. The tables illustrate that more than one peptide associated with HLA molecules may be derived from a single parent protein. Furthermore, many peptides and parent proteins are common to more than once tumor cell source, illustrating the shared nature of HLA-associated peptides among different tumor types.

### EXAMPLE 6

### Peptide Synthesis

[0119] Peptides were synthesized using a Gilson (Madison, Wis.) AMS 422 multiple peptide synthesizer. Quantities of 10 μMol were synthesized using conventional FMOC amino acids, resins, and chemical techniques. Peptides were purified by RP-HPLC using a 4.6 mm×100 mm POROS (Perseptive Biosystems, Cambridge, Mass.) column and a 10 min, 0-60% acetonitrile in 0.1% TFA gradient.

### EXAMPLE 7

### Generation of Monocyte-Derived DC and Peptide Loading

[0120] PBMC were purified from HLA-A2⁺ normal donor blood using lymphocyte separation media (Cappel ICN Biomedical, Aurora, Ohio). PBMC (5.3×10⁶) were added to individual wells of a 24-well cluster plate (Costar, Corning, N.Y.) in 1.0 ml of serum-free AIM-V medium (Life Technologies) and allowed to adhere for 60 min at 37° C. Non-adherent cells were removed and saved as a source of effector T cells. Adherent PBMC (˜8.3×10⁵/well) were then pulsed with 50 mg/ml synthetic peptides in serum-free AIM-V medium containing 1.5 mg/ml β₂-microglobulin (Calbiochem-Novabiochem, San Diego, Calif.) and incubated for 2 h at 37° C. Unbound peptides were aspirated and the wells washed with media.

[0121] Monocyte-derived DC were generated as follows. PBMC (5.3×10⁷) were allowed to adhere in T-75 flasks (Corning) in 10 ml of serum-free AIM-V medium for 60 min at 37° C. Non-adherent cells were collected as a source of effector T cells and pooled with the previous collection above. Adherent monocytes in flasks were then exposed to recombinant human granulocyte macrophage colony stimulating factor (GM-CSF, 25 ng/ml; Peprotech) and recombinant human IL-4 (100 ng/ml; Peprotech) in 10 ml of AIM-V medium containing 10% heat-inactivated FBS. DC obtained by this method [immature DC (iDC)] are characterized by expression of low levels of CD83, CD80, CD86, and HLA class I and class II molecules (data not shown).

[0122] Mature DC (mDC) were obtained by exposing day 5 DC cultures to recombinant soluble CD40 ligand (sCD40L; Peprotech) at 1.5 mg/ml for 24 h in the presence of 25 ng/ml GM-CSF and are characterized by expression of high levels of CD80, CD86, and HLA class I and class II molecules. mDC were harvested, washed, pulsed with 5 mg/ml peptide in serum-free AIM-V medium and irradiated (5000 rad) prior to use as stimulators.

### EXAMPLE 8

### Generation of Peptide-Specific CTL

[0123] The protocol used here is a modification of the method described by Plebanski et al. (Eur. J. Immunol. 25:1783, (1995)). CTL to peptide were generated by 3±4 cycles of stimulation with peptide-loaded APC. For the first round of stimulation (day 0), T cells or non-adherent PBMC from above (2.3×10⁶/ml or 4.3×10⁶ per well) were added in bulk (CD4⁺, CD8⁺, NK, etc.) to adherent PBMC-loaded peptides in serum-free medium (50 mg/ml), β₂-microglobulin (1.5 mg/ml) (Calbiochem-Novabiochem), recombinant human IL-7 (5 ng/ml) (Peprotech) and keyhole limpet hemocyanin (5 mg/ml) (Sigma, St Louis, Mo.). Cultures were re-stimulated with iDC every 7 days, pulsed with varying amounts of peptide (second round 25 mg/ml, third round 10 mg/ml) and irradiated (5000 rad) on day 8. At each re-stimulation, the T cells were transferred to new plates by first aspirating 70% of spent media in wells and then transferring the pooled contents to a new plate. Fresh IL-7 was added at each re-stimulation. The responder:stimulator (T cell:DC) ratio was set at 20 for each stimulation. Recombinant human IL-2 (10 U/ml) was added on day 5 after each re-stimulation.

[0124] Prior to ⁵¹Cr-release assay, the T cells were harvested and CD8⁺ T cells were purified by positive selection using CD8⁺ microbeads immunomagnetic cell separation with MACS kit (Miltenyi Biotec, Auburn, Calif.). If a fourth round of stimulation was necessary following CTL analysis, the CTL were pulsed as before, except with 5±10 mg/ml of peptide.

### EXAMPLE 9

### Generation of Allospecific CTL

[0125] HLA-A2-allospecific CTL were obtained in a mixed lymphocyte reaction by repeated stimulation of HLA-A3⁺ PBMC (responders) with irradiated HLA-A2⁺ stimulator PBMC at a ratio of 10:1 in the presence of 10 U/ml IL-2. Stimulation was repeated weekly with PBMC from different HLA-A2⁺ donors so as to minimize alloresponse to non-HLA-A2 antigens. T cells were assessed for lysis on several HLA-A2⁺ targets including tumor cells, EBV-B cells and HLA-A3⁺ targets every week after the third round of stimulation.

### EXAMPLE 10

### CTL Expansion

[0126] Expansion of large numbers of peptide-specific or HLA-A2-allospecific CTL was achieved by culturing 5.3×10⁴±1.3×10⁵ T cells around day 6 or 7 post peptide- or allostimulation in the presence of 2.5-3.0×10⁷ irradiated (5000 rad) allogeneic normal donor PBMC coated with anti-CD3 antibody at 10 ng/ml (BD PharMingen, San Diego, Calif.) and 25 U/ml of recombinant human IL-2 (Peprotech) in a final volume of 30 ml RPMI medium. Media changes with IL-2 addition (50 U/ml) were effected on days 5 and 8. Cells were harvested for cytotoxicity assays on days 10±12 and re-stimulated or frozen for later use.

### EXAMPLE 11

### ⁵¹Cr-Release Cytotoxicity Assay

[0127] The standard 4-h Cr-release assay was performed in 96-well V-bottomed microplates. Target cells in suspension (T2, C1R.A2, B-LCL and K562) were labeled with 100 mCi Na₂⁵¹CrO4 (NEN Life Science, Boston, Mass.) per 1.3×10⁶ cells either overnight (˜6±18 h) in 5 ml RPMI 1640 media containing 2±5% FBS or for 60±90 min at 37° C. directly with the cell pellet in the case of adherent cells (tumor cell lines and control lines). Labeling was terminated by washing the targets with cold media containing 5% FBS for a total of three washes. Target cells were resuspended at a concentration of 2-3×10⁴/ml. About 2-3×10³ targets in 100 ml were delivered to each well containing CTL (effectors) seeded at different E:T ratios. Spontaneous release wells contained targets in media alone, while maximal release wells contained targets in 2% NP-40 detergent (Igepal CA-630; Sigma). HLA restriction of CTL-mediated killing was achieved by preincubation of targets with HLA-specific antibodies prior to incubation with CTL.

[0128] The plate was gently spun for 1±2 min and incubated at 37° C. for 4 h. For harvesting assay plates, 100 ml of supernatants from the wells was transferred to counting tubes (USA Scientific) and g counts were determined in a g counter (ICN Micromedic Systems, Huntsville, Ala.). Cytolytic activity of T cells was expressed in percent specific lysis as follows: specific lysis={[experimental release(c.p.m.)±spontaneous release(c.p.m.)]/[maximal release(c.p.m.)±spontaneous release(c.p.m.)]}.

### EXAMPLE 12

### Competitive Inhibition Assay

[0129] Peptide-stimulated CTL were reacted with ⁵¹Cr-labeled Ov2 tumor cells (E:T ratio of 40) in the presence of excess of cold targets in a 4-h Cr-release assay. Cold targets were either empty T2 cells, T2 cells pulsed with 1 mg/ml relevant peptide (used to stimulate CTL) or irrelevant (control) peptides (HER-2/neu 369±377 or MART 127±35), or IFN-γ pre-treated tumor cells (SKOV3.A2 and OVCAR 3) with the cold target in 5-fold excess of the hot target. Results indicate that (i) CTL show specific interaction with the peptide to which they are sensitized to, and (ii) CTL compete for similar epitopes presented on Ov2 as were found in SKOV3.A2 and OVCAR3 cell lines by MS.

TABLE 2
Description of Fragments, Parent Sequence Identification, Parent SwissProt

| SEQ | | | | |
|---|---|---|---|---|
| ID | Peptide | | SwissProt ID | Cell |
| NO: | Fragment | Parent Protein | No. | Line(s) |
| 1 | EMTTLEKVI | 150 kDa oxygen-regulated protein precursor | /:spt\|Q9Y4L1\| | M |
| | | (Orp150) | | |
| 2 | SLPEFQQFL | 1-phosphatidylinositol-4,5-bisphosphate | /:spt\|P19174\| | M |
| | | phosphodiesterase | | |
| 3 | TLLTKPVEI | 1-phosphatidylinositol-4,5-bisphosphate | /:spt\|P19174\| | S |
| | | phosphodiesterase | | |
| 4 | AILGPTFTL | 3-hydroxy-3-methylglutaryl-coenzyme A | /:spt\|P04035\| | M |
| | | reductase | | |
| 5 | FLDKELTGL | 3-hydroxy-3-methylglutaryl-coenzyme A | /:spt\|P04035\| | S |
| | | reductase | | |
| 6 | KLLEPVLL | 40S ribosomal protein S16 | /:spt\|P17008\| | M, O, S |
| 7 | RLFEGNALL | 40S ribosomal protein S9 | /:spt\|P46781\| | O |
| 8 | YDALDVANKIGII | 60S ribosomal protein L23a | /:spt\|P29316\| | M |
| 9 | MDLNKTEEV | ABC A13 | /:trm\|Q86UQ4\| | M |
| 10 | KLLPQLTYL | Acidic leucine-rich nuclear phosphoprotein 32 | /:spt\|P39687\| | M, O, S |
| | | family member | | |
| 11 | FVLDKVPFL | Actin-binding protein anillin | /:trm\|Q9NVP0\| | M |
| 12 | DEEFEIELE | Active breakpoint cluster region-related | /:spt\|Q12979\| | O |
| | | protein | | |
| 13 | LSDFLKANV | Activin receptor type II precursor | /:spt\|P27037\| | O, S |
| 14 | GGKMLLIAIL | Angiopoietin 1 receptor precursor | /:spt\|Q02763\| | M |
| 15 | NEDALIEIL | Annexin A3 (Annexin III) (Lipocortin III) | /:spt\|P12429\| | M |
| 16 | PAPATTFAHLD | ATP synthase beta chain, mitochondrial | /:spt\|P06576\| | S |
| | | precursor | | |
| 17 | YLLEMKLKN | ATP-binding cassette sub-family A member 9 | /:trm\|Q8IUA7\| | O |
| 18 | NLEQQETEP | ATP-binding cassette, sub-family A, member 2 | /:spt\|Q9BZC7\| | O, S |
| 19 | KIIDIFTTL | Axonemal dynein heavy chain DNAH5 | /:trm\|Q8TE73\| | M |
| 20 | YGLPVVVKL | Beta-catenin (PRO2286) | /:spt\|P35222\| | M |
| 21 | LNLMALGGFL | BIG3 | /:trm\|Q9ULH6\| | M |
| 22 | NLAVIFDLLL | BIG3 | /:trm\|Q9ULH6\| | O |
| 23 | PSILELEEL | Branching-enzyme interacting dual-specificity | /:trm\|Q96J67\| | M |
| | | protein | | |
| 24 | SLITLIEKV | Carboxypeptidase D precursor (gp180) | /:spt\|O75976\| | M, S |
| 25 | FENQEVQAI | Cell cycle checkpoint protein | /:trm\|O75714\| | S |
| 26 | GKLLNEVKI | CENP-F kinetochore protein (Mitosin) | /:spt\|P49454\| | O |
| 27 | WLAEKLPTL | CH-TOG protein | /:spt\|Q14008\| | O |
| 28 | NIIPYITNV | Clathrin heavy chain 1 (CLH-17) | /:spt\|Q00610\| | M |
| 29 | KLLPGDIHQI | Dedicator of cytokinesis protein 1 | /:spt\|Q14185\| | S |
| 30 | FIEGELDDR | Desmoglein 2 precursor (HDGC) | /:spt\|Q14126\| | O |
| 31 | NLNDKQIVK | DNA ligase III (Polydeoxyribonucleotide | /:spt\|P49916\| | M |
| | | synthaseIII) | | |
| 32 | YLKILNEQ | DNA mismatch repair protein Msh3 | /:spt\|P20585\| | O |
| 33 | IEKDSPFI | DNA polymerase zeta catalytic subunit | /:spt\|O60673\| | O |
| | | (hREV3) | | |
| 34 | RVIDYILDL | DNA-binding protein inhibitor ID-3 | /:spt\|Q02535\| | M |
| 35 | RLDELGGVYL | Dolichyl-diphosphooligosaccharide--protein | /:spt\|P04844\| | O, S |
| | | glycosyltransferase | | |
| 36 | EDLNQQLLE | Endoglycan (PODLX2 protein) (vascular) | /:trm\|Q9NZ53\| | O |
| 37 | VYIVQDGPPQ | Ephrin-B3 precursor | /:spt\|Q15768\| | O |
| 38 | FLDKQGFYV | Epidermal growth factor receptor substrate | /:trm\|Q9UBC2\| | S |
| | | EPS15R | | |
| 39 | EALNKKAIQI | FKBP-rapamycin associated protein (FRAP) | /:spt\|P42345\| | M, O |
| 40 | YLDLSENRL | Flightless-I protein homolog | /:spt\|Q13045\| | O |
| 41 | LQELPYNEL | FLJ23447 protein | /:gb\|AAH57786. | O |
| 42 | ALLRRPTV | G2/mitotic-specific cyclin B2 | /:spt\|O95067\| | M |
| 43 | TLLRLLYEA | GA17 protein | /:trm\|O60735\| | M, O, S |
| 44 | ILPVPAFNV | Gamma enolase - Enolase 2 | /:spt\|P09104\| | M |
| 45 | LENSEALEL | Gamma enolase - Enolase 2 | /:spt\|P09104\| | O |
| 46 | ALPETTFPAL | Gamma-synergin | /:trm\|Q9UMZ2\| | M |
| 47 | FVEVKDPED | Glycoprotein 25L2 precursor | /:spt\|Q9BVK6\| | M |
| 48 | EAQEEIAFL | Golgi autoantigen, golgin subfamily B | /:spt\|Q14789\| | M, O |
| | | member 1 | | |
| 49 | QLVVELKDI | Golgi autoantigen, golgin subfamily B | /:spt\|Q14789\| | O |
| | | member 1 (Giantin) | | |
| 50 | VLKEIVERV | GPI-anchored protein p137 (p137GPI) | /:spt\|Q14444\| | O, S |
| 51 | SLSVQSPAAL | HIRA protein (TUP1 like enhancer of split | /:spt\|P54198\| | S |
| | | protein 1) | | |
| 52 | YIDLLKKML | Homeodomain-interacting protein kinase 1 | /:spt\|Q86Z02\| | M |
| 53 | PEDEEPENL | Huntingtin interacting protein 1 related (Hip1- | /:spt\|O75146\| | M, O, S |
| | | related) | | |
| 54 | SLPEVLPIL | Integrin alpha-6 precursor (VLA-6) (CD49f) | /:spt\|P23229\| | M |
| 55 | YVITDLTQL | Interleukin-1 receptor-associated kinase-2 | /:spt\|O43187\| | M |
| 56 | FILLILSLI | Interleukin-5 receptor alpha chain precursor | /:spt\|Q01344\| | M |
| 57 | IRPFDQLFAL | Interleukin-5 receptor alpha chain precursor | /:spt\|Q01344\| | S |
| 58 | GQVERFETV | Interleukin-6 receptor beta chain precursor | /:spt\|P40189\| | O |
| 59 | KILDYEVTL | Interleukin-6 receptor beta chain precursor | /:spt\|P40189\| | O |
| 60 | LLLENNAQV | Inversin protein alternative isoform | /:trm\|Q9Y488\| | M |
| 61 | ENEEEEIEL | Jerky protein homolog like (HHMJG) | /:spt\|Q9Y4A0\| | O |
| 62 | PFSMEKLLY | Jumonji protein | /:spt\|Q92833\| | O |
| 63 | ALWNEEALL | Lamin B receptor | /:spt\|Q14739\| | M |
| 64 | LENEANNIK | Laminin gamma-1 chain precursor (Laminin | /:spt\|P11047\| | M |
| | | B2 chain) | | |
| 65 | MKRLLLLF | Matrix metalloprotease MMP-27 | /:trm\|Q9H306\| | M, O, S |
| 66 | FPILTVLQAV | Medulloblastoma antigen MU-MB-50.4 | /:spt\|Q9P055\| | O |
| 67 | QILSLEEKI | Melanoma ubiquitous mutated protein | /:trm\|Q13109\| | O |
| 68 | LQNFEMQPKL | Melastatin 1 | /:trm\|O75560\| | M |
| 69 | RLQMLLVF | Midasin (MIDAS-containing protein) | /:spt\|Q9NU22\| | M |
| 70 | KLILRLHKL | Mitogen-activated protein kinase kinase kinase 4 | /:spt\|Q9Y6R4\| | S |
| 71 | EISDELMEF | M-phase inducer phosphatase 3 | /:spt\|P30307\| | M |
| 72 | YNLKDRLT | Nesprin 2 (Nuclear envelope spectrin repeat | /:spt\|Q9NU50\| | M |
| | | protein 2) | | |
| 73 | ANIEGLEGKL | Neuroblast differentiation associated protein | /:spt\|Q09666\| | S |
| | | AHNAK | | |
| 74 | KMPKIKMPK | Neuroblast differentiation associated protein | /:spt\|Q09666\| | M |
| | | AHNAK | | |
| 75 | SILSLVTKI | NF45 protein | /:trm\|Q12905\| | M |
| 76 | LLDQLDKDI | Nucleolar protein Nop56 (Nucleolar protein | /:spt\|O00567\| | O |
| | | 5A) | | |
| 77 | SNLLVLLND | Peroxisomal membrane protein PEX16 | /:spt\|Q9Y5Y5\| | M, O |
| | | (Peroxin-16) | | |
| 78 | YIGEIFTQI | Placental thrombin inhibitor(Cytoplasmic | /:spt\|P35237\| | M, O, S |
| | | antiproteinase) | | |
| 79 | MILNSLINK | Platelet glycoprotein IV | /:spt\|P16671\| | M |
| 80 | MQSDLIPEE | Plectin 1 | /:spt\|Q15149\| | M |
| 81 | FLLDPVKGERL | Plectin 1 (PLTN) (PCN) (Hemidesmosomal | /:spt\|Q15149\| | S |
| | | protein 1) | | |
| 82 | VAGIKVNQVK | Polycystic kidney and hepatic disease 1 | /:spt\|Q8TCZ9\| | M, O |
| | | precursor | | |
| 83 | QLVDIIEKV | Proteasome activator complex subunit 3 | /:spt\|Q12920\| | O, S |
| 84 | KLPFTIPEL | Protein kinase/endoribonulcease | /:trm\|O75460\| | M |
| 85 | KEHLYFETV | Protein pM5 precursor | /:spt\|Q15155\| | S |
| 86 | SLLPPDALVGL | Protein transport protein Sec23B | /:spt\|Q15437\| | M, O, S |
| 87 | KLFGMIITI | Protein transport protein Sec61 alpha subunit | /:spt\|P38378\| | O |
| | | isoform 1 | | |
| 88 | LLVEPVINSY | Protein-glutamine gamma-glutamyltransferase | /:spt\|P21980\| | M, S |
| 89 | NEPQYIILE | Proto-oncogene tyrosine-protein kinase ROS | /:spt\|P08922\| | S |
| | | precursor | | |
| 90 | EAFLQEAQI | Proto-oncogene tyrosine-protein kinase YES | /:spt\|P07947\| | O |
| 91 | LLEIEDLQV | Ras GTPase-activating-like protein IQGAP1 | /:spt\|P46940\| | S |
| | | (P195) | | |
| 92 | VTDKVLNSI | Ras GTPase-activating-like protein IQGAP2 | /:spt\|Q13576\| | O, S |
| 93 | LDLIMKRME | Ras-related protein Rab-27A (Rab-27) | /:spt\|P51159\| | M |
| 94 | CEEILNYVL | Recombination and sister chromatid cohesion | /:trm\|O95072\| | S |
| | | protein homolog | | |
| 95 | EEEAILLEI | Recombination and sister chromatid cohesion | /:trm\|O95072\| | M |
| | | protein homolog | | |
| 96 | YLSEQDSEL | Regulating synaptic membrane exocytosis | /:spt\|Q9HBA5\| | M |
| | | protein 1 | | |
| 97 | NIISKITAE | RW1 protein (Fragment) | /:spt\|Q92545\| | S |
| 98 | KILLPLINQ | Ryanodine receptor 1 | /:spt\|P21817\| | M |
| 99 | NELALSLEEP | Ryanodine receptor 3 (RyR3) | /:spt\|Q15413\| | O |
| 100 | EDQGLILQD | Ryanodine receptor 3 (RyR3) | /:spt\|Q15413\| | M |
| 101 | QLIDKVWQL | SEC14-like protein 1 | /:spt\|Q92503\| | M, O, S |
| 102 | KIPVSAFLL | Secreted CEMENT gland protein XAG-2 | /:trm\|O95994\| | M |
| | | homolog | | |
| 103 | FLDPEKKLF | Serine phosphatase FCP1a | /:trm\|Q9Y6F5\| | S |
| 104 | MDKEVDDIL | Serine phosphatase FCP1a | /:trm\|Q9Y6F5\| | M |
| 105 | YRSDLEIIF | Serine/threonine protein phosphatase with EF- | /:spt\|O14829\| | S |
| | | hands-1 | | |
| 106 | ILLKDILSV | Serine-protein kinase ATM | /:spt\|Q13315\| | M |
| 107 | LLIERGASL | Serologically defined breast cancer antigen | /:trm\|Q96I86\| | M |
| | | NY-BR-16 | | |
| 108 | TLQEFLKLA | SH3 domain-binding glutamic acid-rich-like | /:spt\|Q9H299\| | M |
| | | protein 3 | | |
| 109 | SLVDIYSQL | Signal transducer and activator of transcription 6 | /:spt\|P42226\| | M |
| 110 | YLLDLHSYL | TEB4 protein | /:trm\|O14670\| | M, O, S |
| 111 | YLIELKKN | Tetratricopeptide repeat domain 1 | /:gb\|AAH00942. | M |
| 112 | MLPSILNQL | Transcription factor BTF3 | /:spt\|P20290\| | M |
| 113 | AFKNLVQRN | Transcription factor Dp-1 (E2F dimerization | /:spt\|Q14186\| | O |
| | | partner 1) | | |
| 114 | ISNDKFEYL | Transcription factor Dp-1 (E2F dimerization | /:spt\|Q14186\| | M, S |
| | | partner 1) | | |
| 115 | VILHLTVLL | Transcription factor ELYS | /:trm\|Q8WYP5\| | M |
| 116 | NLFRAPIYL | Transcription initiation factor TFIID 250 kDa | /:spt\|P21675\| | M, O |
| | | subunit | | |
| 117 | NMEEQPINI | Transcriptional repressor CTCF (CCCTC- | /:spt\|P49711\| | M |
| | | binding factor) | | |
| 118 | SVVPYLPRL | Tyrosine-protein kinase ABL2 (EC 2.7.1.112) | /:spt\|P42684\| | M |
| 119 | IIVDIFHGL | Ubiquitin carboxyl-terminal hydrolase 15 | /:spt\|Q9Y4E8\| | M |
| 120 | DEELAKVEI | Vasopressin V1b receptor | /:spt\|P47901\| | M |
| 121 | KLFNEFIQL | WD-repeat protein 3 | /:spt\|Q9UNX4\| | M, O |
| 122 | DLEVKQEEV | WUGSC: H_NH0481J13.1 protein | /:trm\|Q9UDM4\| | M, O, S |
| 123 | MQDVLLSNE | Zinc finger protein Rlf | /:spt\|Q13129\| | M |

Identification Number and Cell Lines in which the peptide was identified for Peptides 1-123.
Cell lines: M: Breast Tumor Cell Line MDA-mb-231; S: Ovarian Tumor Cell Line SKOV3.A2; O: Ovarian Tumor Cell Line OVCAR3.

[0130] TABLE 3
SEQ ID NO, Parent Protein Identification and SwissProt Identification Number for
parent proteins SEQ ID NO: 124-233, Identified in One or More of the Tumor Cell Lines
MDA-mb-231, SKOV3.A2, and OVCAR3.

| SEQ ID | | |
|---|---|---|
| NO: | Parent Protein | SwissProt ID No. |
| 124 | 150 kDa oxygen-regulated protein precursor (Orp150) | /:spt\|Q9Y4L1\| |
| 125 | 1-phosphatidylinositol-4,5-bisphosphate phosphodiesterase | /:spt\|P19174\| |
| 126 | 3-hydroxy-3-methylglutaryl-coenzyme A reductase | /:spt\|P04035\| |
| 127 | 40S ribosomal protein S16 | /:spt\|P17008\| |
| 128 | 40S ribosomal protein S9 | /:spt\|P46781\| |
| 129 | 60S ribosomal protein L23a | /:spt\|P29316\| |
| 130 | ABC A13 | /:trm\|Q86UQ4\| |
| 131 | Acidic leucine-rich nuclear phosphoprotein 32 family member | /:spt\|P39687\| |
| 132 | Actin-binding protein anillin | /:trm\|Q9NVP0\| |
| 133 | Active breakpoint cluster region-related protein | /:spt\|Q12979\| |
| 134 | Activin receptor type II precursor | /:spt\|P27037\| |
| 135 | Angiopoietin 1 receptor precursor | /:spt\|Q02763\| |
| 136 | Annexin A3 (Annexin III) (Lipocortin III) | /:spt\|P12429\| |
| 137 | ATP synthase beta chain, mitochondrial precursor | /:spt\|P06576\| |
| 138 | ATP-binding cassette sub-family A member 9 | /:trm\|Q8IUA7\| |
| 139 | ATP-binding cassette, sub-family A, member 2 | /:spt\|Q9BZC7\| |
| 140 | Axonemal dynein heavy chain DNAH5 | /:trm\|Q8TE73\| |
| 141 | Beta-catenin (PRO2286) | /:spt\|P35222\| |
| 142 | BIG3 | /:trm\|Q9ULH6\| |
| 143 | Branching-enzyme interacting dual-specificity protein | /:trm\|Q96J67\| |
| 144 | Carboxypeptidase D precursor (gp180) | /:spt\|O75976\| |
| 145 | Cell cycle checkpoint protein | /:trm\|O75714\| |
| 146 | CENP-F kinetochore protein (Mitosin) | /:spt\|P49454\| |
| 147 | CH-TOG protein | /:spt\|Q14008\| |
| 148 | Clathrin heavy chain 1 (CLH-17) | /:spt\|Q00610\| |
| 149 | Dedicator of cytokinesis protein 1 | /:spt\|Q14185\| |
| 150 | Desmoglein 2 precursor (HDGC) | /:spt\|Q14126\| |
| 151 | DNA ligase III (Polydeoxyribonucleotide synthaseIII) | /:spt\|P49916\| |
| 152 | DNA mismatch repair protein Msh3 | /:spt\|P20585\| |
| 153 | DNA polymerase zeta catalytic subunit (hREV3) | /:spt\|O60673\| |
| 154 | DNA-binding protein inhibitor ID-3 | /:spt\|Q02535\| |
| 155 | Dolichyl-diphosphooligosaccharide--protein glycosyltransferase | /:spt\|P04844\| |
| 156 | Endoglycan (PODLX2 protein) (vascular) | /:trm\|Q9NZ53\| |
| 157 | Ephrin-B3 precursor | /:spt\|Q15768\| |
| 158 | Epidermal growth factor receptor substrate EPS15R | /:trm\|Q9UBC2\| |
| 159 | FKBP-rapamycin associated protein (FRAP) | /:spt\|P42345\| |
| 160 | Flightless-I protein homolog | /:spt\|Q13045\| |
| 161 | FLJ23447 protein | /:gb\|AAH57786. |
| 162 | G2/mitotic-specific cyclin B2 | /:spt\|O95067\| |
| 163 | GA17 protein | /:trm\|O60735\| |
| 164 | Gamma enolase —Enolase 2 | /:spt\|P09104\| |
| 165 | Gamma-synergin | /:trm\|Q9UMZ2\| |
| 166 | Glycoprotein 25L2 precursor | /:spt\|Q9BVK6\| |
| 167 | Golgi autoantigen, golgin subfamily B member 1 | /:spt\|Q14789\| |
| 168 | GPI-anchored protein p137 (p137GPI) | /:spt\|Q14444\| |
| 169 | HIRA protein (TUP1 like enhancer of split protein 1) | /:spt\|P54198\| |
| 170 | Homeodomain-interacting protein kinase 1 | /:spt\|Q86Z02\| |
| 171 | Huntingtin interacting protein 1 related (Hip1-related) | /:spt\|O75146\| |
| 172 | Integrin alpha-6 precursor (VLA-6) (CD49f) | /:spt\|P23229\| |
| 173 | Interleukin-1 receptor-associated kinase-2 | /:spt\|O43187\| |
| 174 | Interleukin-5 receptor alpha chain precursor | /:spt\|Q01344\| |
| 175 | Interleukin-6 receptor beta chain precursor | /:spt\|P40189\| |
| 176 | Inversin protein alternative isoform | /:trm\|Q9Y488\| |
| 177 | Jerky protein homolog like (HHMJG) | /:spt\|Q9Y4A0\| |
| 178 | Jumonji protein | /:spt\|Q92833\| |
| 179 | Lamin B receptor | /:spt\|Q14739\| |
| 180 | Laminin gamma-1 chain precursor (Laminin B2 chain) | /:spt\|P11047\| |
| 181 | Matrix metalloprotease MMP-27 | /:trm\|Q9H306\| |
| 182 | Medulloblastoma antigen MU-MB-50.4 | /:spt\|Q9P055\| |
| 183 | Melanoma ubiquitous mutated protein | /:trm\|Q13109\| |
| 184 | Melastatin 1 | /:trm\|O75560\| |
| 185 | Midasin (MIDAS-containing protein) | /:spt\|Q9NU22\| |
| 186 | Mitogen-activated protein kinase kinase kinase 4 | /:spt\|Q9Y6R4\| |
| 187 | M-phase inducer phosphatase 3 | /:spt\|P30307\| |
| 188 | Nesprin 2 (Nuclear envelope spectrin repeat protein 2) | /:spt\|Q9NU50\| |
| 189 | Neuroblast differentiation associated protein AHNAK | /:spt\|Q09666\| |
| 190 | NF45 protein | /:trm\|Q12905\| |
| 191 | Nucleolar protein Nop56 (Nucleolar protein 5A) | /:spt\|O00567\| |
| 192 | Peroxisomal membrane protein PEX16 (Peroxin-16) | /:spt\|Q9Y5Y5\| |
| 193 | Placental thrombin inhibitor(Cytoplasmic antiproteinase) | /:spt\|P35237\| |
| 194 | Platelet glycoprotein IV | /:spt\|P16671\| |
| 195 | Plectin 1 | /:spt\|Q15149\| |
| 196 | Polycystic kidney and hepatic disease 1 precursor | /:spt\|Q8TCZ9\| |
| 197 | Proteasome activator complex subunit 3 | /:spt\|Q12920\| |
| 198 | Protein kinase/endoribonulcease | /:trm\|O75460\| |
| 199 | Protein pM5 precursor | /:spt\|Q15155\| |
| 200 | Protein transport protein Sec23B | /:spt\|Q15437\| |
| 201 | Protein transport protein Sec61 alpha subunit isoform 1 | /:spt\|P38378\| |
| 202 | Protein-glutamine gamma-glutamyltransferase | /:spt\|P21980\| |
| 203 | Proto-oncogene tyrosine-protein kinase ROS precursor | /:spt\|P08922\| |
| 204 | Proto-oncogene tyrosine-protein kinase YES | /:spt\|P07947\| |
| 205 | Ras GTPase-activating-like protein IQGAP1 (P195) | /:spt\|P46940\| |
| 206 | Ras GTPase-activating-like protein IQGAP2 | /:spt\|Q13576\| |
| 207 | Ras-related protein Rab-27A (Rab-27) | /:spt\|P51159\| |
| 208 | Recombination and sister chromatid cohesion protein homolog | /:trm\|O95072\| |
| 209 | Regulating synaptic membrane exocytosis protein 1 | /:spt\|Q9HBA5\| |
| 210 | RW1 protein (Fragment) | /:spt\|Q92545\| |
| 211 | Ryanodine receptor 1 | /:spt\|P21817\| |
| 212 | Ryanodine receptor 3 (RyR3) | /:spt\|Q15413\| |
| 213 | SEC14-like protein 1 | /:spt\|Q92503\| |
| 214 | Secreted CEMENT gland protein XAG-2 homolog | /:trm\|O95994\| |
| 215 | Serine phosphatase FCP1a | /:trm\|Q9Y6F5\| |
| 216 | Serine/threonine protein phosphatase with EF-hands-1 | /:spt\|O14829\| |
| 217 | Serine-protein kinase ATM | /:spt\|Q13315\| |
| 218 | Serologically defined breast cancer antigen NY-BR-16 | /:trm\|Q96I86\| |
| 219 | SH3 domain-binding glutamic acid-rich-like protein 3 | /:spt\|Q9H299\| |
| 220 | Signal transducer and activator of transcription 6 | /:spt\|P42226\| |
| 221 | TEB4 protein | /:trm\|O14670\| |
| 222 | Tetratricopeptide repeat domain 1 | /:gb\|AAH00942. |
| 223 | Transcription factor BTF3 | /:spt\|P20290\| |
| 224 | Transcription factor Dp-1 (E2F dimerization partner 1) | /:spt\|Q14186\| |
| 225 | Transcription factor ELYS | /:trm\|Q8WYP5\| |
| 226 | Transcription initiation factor TFIID 250 kDa subunit | /:spt\|P21675\| |
| 227 | Transcriptional repressor CTCF (CCCTC-binding factor) | /:spt\|P49711\| |
| 228 | Tyrosine-protein kinase ABL2 (EC 2.7.1.112) | /:spt\|P42684\| |
| 229 | Ubiquitin carboxyl-terminal hydrolase 15 | /:spt\|Q9Y4E8\| |
| 230 | Vasopressin V1b receptor | /:spt\|P47901\| |
| 231 | WD-repeat protein 3 | /:spt\|Q9UNX4\| |
| 232 | WUGSC: H_NH0481J13.1 protein | /:trm\|Q9UDM4\| |
| 233 | Zinc finger protein Rlf | /:spt\|Q13129\| |

The application's sequence listing, which the Patent Office published only in electronic form, follows.

SEQUENCE LISTING (233 sequences)

SEQ ID NO: 1 - protein, 9 aa, homo sapiens
EMTTLEKVI

SEQ ID NO: 2 - protein, 9 aa, homo sapiens
SLPEFQQFL

SEQ ID NO: 3 - protein, 9 aa, homo sapiens
TLLTKPVEI

SEQ ID NO: 4 - protein, 9 aa, homo sapiens
AILGPTFTL

SEQ ID NO: 5 - protein, 9 aa, homo sapiens
FLDKELTGL

SEQ ID NO: 6 - protein, 8 aa, homo sapiens
KLLEPVLL

SEQ ID NO: 7 - protein, 9 aa, homo sapiens
RLFEGNALL

SEQ ID NO: 8 - protein, 13 aa, homo sapiens
YDALDVANKIGII

SEQ ID NO: 9 - protein, 9 aa, homo sapiens
MDLNKTEEV

SEQ ID NO: 10 - protein, 9 aa, homo sapiens
KLLPQLTYL

SEQ ID NO: 11 - protein, 9 aa, homo sapiens
FVLDKVPFL

SEQ ID NO: 12 - protein, 9 aa, homo sapiens
DEEFEIELE

SEQ ID NO: 13 - protein, 9 aa, homo sapiens
LSDFLKANV

SEQ ID NO: 14 - protein, 10 aa, homo sapiens
GGKMLLIAIL

SEQ ID NO: 15 - protein, 9 aa, homo sapiens
NEDALIEIL

SEQ ID NO: 16 - protein, 11 aa, homo sapiens
PAPATTFAHLD

SEQ ID NO: 17 - protein, 9 aa, homo sapiens
YLLEMKLKN

SEQ ID NO: 18 - protein, 9 aa, homo sapiens
NLEQQETEP

SEQ ID NO: 19 - protein, 9 aa, homo sapiens
KIIDIFTTL

SEQ ID NO: 20 - protein, 9 aa, homo sapiens
YGLPVVVKL

SEQ ID NO: 21 - protein, 10 aa, homo sapiens
LNLMALGGFL

SEQ ID NO: 22 - protein, 10 aa, homo sapiens
NLAVIFDLLL

SEQ ID NO: 23 - protein, 9 aa, homo sapiens
PSILELEEL

SEQ ID NO: 24 - protein, 9 aa, homo sapiens
SLITLIEKV

SEQ ID NO: 25 - protein, 9 aa, homo sapiens
FENQEVQAI

SEQ ID NO: 26 - protein, 9 aa, homo sapiens
GKLLNEVKI

SEQ ID NO: 27 - protein, 9 aa, homo sapiens
WLAEKLPTL

SEQ ID NO: 28 - protein, 9 aa, homo sapiens
NIIPYITNV

SEQ ID NO: 29 - protein, 10 aa, homo sapiens
KLLPGDIHQI

SEQ ID NO: 30 - protein, 9 aa, homo sapiens
FIEGELDDR

SEQ ID NO: 31 - protein, 9 aa, homo sapiens
NLNDKQIVK

SEQ ID NO: 32 - protein, 8 aa, homo sapiens
YLKILNEQ

SEQ ID NO: 33 - protein, 8 aa, homo sapiens
IEKDSPFI

SEQ ID NO: 34 - protein, 9 aa, homo sapiens
RVIDYILDL

SEQ ID NO: 35 - protein, 10 aa, homo sapiens
RLDELGGVYL

SEQ ID NO: 36 - protein, 9 aa, homo sapiens
EDLNQQLLE

SEQ ID NO: 37 - protein, 10 aa, homo sapiens
VYIVQDGPPQ

SEQ ID NO: 38 - protein, 9 aa, homo sapiens
FLDKQGFYV

SEQ ID NO: 39 - protein, 10 aa, homo sapiens
EALNKKAIQI

SEQ ID NO: 40 - protein, 9 aa, homo sapiens
YLDLSENRL

SEQ ID NO: 41 - protein, 9 aa, homo sapiens
LQELPYNEL

SEQ ID NO: 42 - protein, 8 aa, homo sapiens
ALLRRPTV

SEQ ID NO: 43 - protein, 9 aa, homo sapiens
TLLRLLYEA

SEQ ID NO: 44 - protein, 9 aa, homo sapiens
ILPVPAFNV

SEQ ID NO: 45 - protein, 9 aa, homo sapiens
LENSEALEL

SEQ ID NO: 46 - protein, 10 aa, homo sapiens
ALPETTFPAL

SEQ ID NO: 47 - protein, 9 aa, homo sapiens
FVEVKDPED

SEQ ID NO: 48 - protein, 9 aa, homo sapiens
EAQEEIAFL

SEQ ID NO: 49 - protein, 9 aa, homo sapiens
QLVVELKDI

SEQ ID NO: 50 - protein, 9 aa, homo sapiens
VLKEIVERV

SEQ ID NO: 51 - protein, 10 aa, homo sapiens
SLSVQSPAAL

SEQ ID NO: 52 - protein, 9 aa, homo sapiens
YIDLLKKML

SEQ ID NO: 53 - protein, 9 aa, homo sapiens
PEDEEPENL

SEQ ID NO: 54 - protein, 9 aa, homo sapiens
SLPEVLPIL

SEQ ID NO: 55 - protein, 9 aa, homo sapiens
YVITDLTQL

SEQ ID NO: 56 - protein, 9 aa, homo sapiens
FILLILSLI

SEQ ID NO: 57 - protein, 10 aa, homo sapiens
IRPFDQLFAL

SEQ ID NO: 58 - protein, 9 aa, homo sapiens
GQVERFETV

SEQ ID NO: 59 - protein, 9 aa, homo sapiens
KILDYEVTL

SEQ ID NO: 60 - protein, 9 aa, homo sapiens
LLLENNAQV

SEQ ID NO: 61 - protein, 9 aa, homo sapiens
ENEEEEIEL

SEQ ID NO: 62 - protein, 9 aa, homo sapiens
PFSMEKLLY

SEQ ID NO: 63 - protein, 9 aa, homo sapiens
ALWNEEALL

SEQ ID NO: 64 - protein, 9 aa, homo sapiens
LENEANNIK

SEQ ID NO: 65 - protein, 8 aa, homo sapiens
MKRLLLLF

SEQ ID NO: 66 - protein, 10 aa, homo sapiens
FPILTVLQAV

SEQ ID NO: 67 - protein, 9 aa, homo sapiens
QILSLEEKI

SEQ ID NO: 68 - protein, 10 aa, homo sapiens
LQNFEMQPKL

SEQ ID NO: 69 - protein, 8 aa, homo sapiens
RLQMLLVF

SEQ ID NO: 70 - protein, 9 aa, homo sapiens
KLILRLHKL

SEQ ID NO: 71 - protein, 9 aa, homo sapiens
EISDELMEF

SEQ ID NO: 72 - protein, 8 aa, homo sapiens
YNLKDRLT

SEQ ID NO: 73 - protein, 10 aa, homo sapiens
ANIEGLEGKL

SEQ ID NO: 74 - protein, 9 aa, homo sapiens
KMPKIKMPK

SEQ ID NO: 75 - protein, 9 aa, homo sapiens
SILSLVTKI

SEQ ID NO: 76 - protein, 9 aa, homo sapiens
LLDQLDKDI

SEQ ID NO: 77 - protein, 9 aa, homo sapiens
SNLLVLLND

SEQ ID NO: 78 - protein, 9 aa, homo sapiens
YIGEIFTQI

SEQ ID NO: 79 - protein, 9 aa, homo sapiens
MILNSLINK

SEQ ID NO: 80 - protein, 9 aa, homo sapiens
MQSDLIPEE

SEQ ID NO: 81 - protein, 11 aa, homo sapiens
FLLDPVKGERL

SEQ ID NO: 82 - protein, 10 aa, homo sapiens
VAGIKVNQVK

SEQ ID NO: 83 - protein, 9 aa, homo sapiens
QLVDIIEKV

SEQ ID NO: 84 - protein, 9 aa, homo sapiens
KLPFTIPEL

SEQ ID NO: 85 - protein, 9 aa, homo sapiens
KEHLYFETV

SEQ ID NO: 86 - protein, 11 aa, homo sapiens
SLLPPDALVGL

SEQ ID NO: 87 - protein, 9 aa, homo sapiens
KLFGMIITI

SEQ ID NO: 88 - protein, 10 aa, homo sapiens
LLVEPVINSY

SEQ ID NO: 89 - protein, 9 aa, homo sapiens
NEPQYIILE

SEQ ID NO: 90 - protein, 9 aa, homo sapiens
EAFLQEAQI

SEQ ID NO: 91 - protein, 9 aa, homo sapiens
LLEIEDLQV

SEQ ID NO: 92 - protein, 9 aa, homo sapiens
VTDKVLNSI

SEQ ID NO: 93 - protein, 9 aa, homo sapiens
LDLIMKRME

SEQ ID NO: 94 - protein, 9 aa, homo sapiens
CEEILNYVL

SEQ ID NO: 95 - protein, 9 aa, homo sapiens
EEEAILLEI

SEQ ID NO: 96 - protein, 9 aa, homo sapiens
YLSEQDSEL

SEQ ID NO: 97 - protein, 9 aa, homo sapiens
NIISKITAE

SEQ ID NO: 98 - protein, 9 aa, homo sapiens
KILLPLINQ

SEQ ID NO: 99 - protein, 10 aa, homo sapiens
NELALSLEEP

SEQ ID NO: 100 - protein, 9 aa, homo sapiens
EDQGLILQD

SEQ ID NO: 101 - protein, 9 aa, homo sapiens
QLIDKVWQL

SEQ ID NO: 102 - protein, 9 aa, Homo sapiens
KIPVSAFLL

SEQ ID NO: 103 - protein, 9 aa, homo sapiens
FLDPEKKLF

SEQ ID NO: 104 - protein, 9 aa, homo sapiens
MDKEVDDIL

SEQ ID NO: 105 - protein, 9 aa, homo sapiens
YRSDLEIIF

SEQ ID NO: 106 - protein, 9 aa, homo sapiens
ILLKDILSV

SEQ ID NO: 107 - protein, 9 aa, homo sapiens
LLIERGASL

SEQ ID NO: 108 - protein, 9 aa, homo sapiens
TLQEFLKLA

SEQ ID NO: 109 - protein, 9 aa, homo sapiens
SLVDIYSQL

SEQ ID NO: 110 - protein, 9 aa, homo sapiens
YLLDLHSYL

SEQ ID NO: 111 - protein, 8 aa, homo sapiens
YLIELKKN

SEQ ID NO: 112 - protein, 9 aa, homo sapiens
MLPSILNQL

SEQ ID NO: 113 - protein, 9 aa, homo sapiens
AFKNLVQRN

SEQ ID NO: 114 - protein, 9 aa, homo sapiens
ISNDKFEYL

SEQ ID NO: 115 - protein, 9 aa, homo sapiens
VILHLTVLL

SEQ ID NO: 116 - protein, 9 aa, homo sapiens
NLFRAPIYL

SEQ ID NO: 117 - protein, 9 aa, homo sapiens
NMEEQPINI

SEQ ID NO: 118 - protein, 9 aa, homo sapiens
SVVPYLPRL

SEQ ID NO: 119 - protein, 9 aa, homo sapiens
IIVDIFHGL

SEQ ID NO: 120 - protein, 9 aa, homo sapiens
DEELAKVEI

SEQ ID NO: 121 - protein, 9 aa, homo sapiens
KLFNEFIQL

SEQ ID NO: 122 - protein, 9 aa, homo sapiens
DLEVKQEEV

SEQ ID NO: 123 - protein, 9 aa, homo sapiens
MQDVLLSNE

SEQ ID NO: 124 - protein, 999 aa, homo sapiens
MADKVRRQRPRRRVCWALVAVLLADLLALSDTLAVMSVDLGSESMKVAIVKPGVPMEIVLNKESRRKTPVIVTLKENERFFGDSAASMAIKNPKATLRYFQHLLGKQADNPHVALYQARFPEHELTFDPQRQTVHFQISSQLQFSPEEVLGMVLNYSRSLAEDFAEQPIKDAVITVPVFFNQAERRAVLQAARMAGLKVLQLINDNTATALSYGVFRRKDINTTAQNIMFYDMGSGSTVCTIVTYQMVKTKEAGMQPQLQIRGVGFDRTLGGLEMELRLRERLAGLFNEQRKGQRAKDVRENPRAMAKLLREANRLKTVLSANADHMAQIEGLMDDVDFKAKVTRVEFEELCADLFERVPGPVQQALQSAEMSLDEIEQVILVGGATRVPRVQEVLLKAVGKEELGKNINADEAAAMGAVYQAAALSKAFKVKPFVVRDAVVYPILVEFTREVEEEPGIHSLKHNKRVLFSRMGPYPQRKVITFNRYSHDFNFHINYGDLGFLGPEDLRVFGSQNLTTVKLKGVGDSFKKYPDYESKGIKAHFNLDESGVLSLDRVESVFETLVEDSAEEESTLTKLGNTISSLFGGGTTPDAKENGTDTVQEEEESPAEGSKDEPGEQVELKEEAEAPVEDGSQPPPPEPKGDATPEGEKATEKENGDKSEAQKPSEKAEAGPEGVAPAPEGEKKQKPARKRRMVEEIGVELVVLDLPDLPEDKLAQSVQKLQDLTLRDLEKQEREKAANSLEAFIFETQDKLYQPEYQEVSTEEQREEISGKLSAASTWLEDEGVGATTVMLKEKLAELRKLCQGLFFRVEERKKWPERLSALDNLLNHSSMFLKGARLIPEMDQIFTEVEMTTLEKVINETWAWKNATLAEQAKLPATEKPVLLSKDIEAKMMALDREVQYLLNKAKFTKPRPRPKDKNGTRAEPPLNASASDQGEKVIPPAGQTEDAEPISEPEKVETGSEPGDTEPLELGGPGAEPEQKEQSTGQKRPLKNDEL

SEQ ID NO: 125 - protein, 1290 aa, homo sapiens
MAGAASPCANGCGPGAPSDAEVLHLCRSLEVGTVMTLFYSKKSQRPERKTFQVKLETRQITWSRGADKIEGAIDIREIKEIRPGKTSRDFDRYQEDPAFRPDQSHCFVILYGMEFRLKTLSLQATSEDEVNMWIKGLTWLMEDTLQAPTPLQIERWLRKQFYSVDRNREDRISAKDLKNMLSQVNYRVPNMRFLRERLTDLEQRSGDITYGQFAQLYRSLMYSAQKTMDLPFLEASTLRAGERPELCRVSLPEFQQFLLDYQGELWAVDRLQVQEFMLSFLRDPLREIEEPYFFLDEFVTFLFSKENSVWNSQLDAVCPDTMNNPLSHYWISSSHNTYLTGDQFSSESSLEAYARCLRMGCRCIELDCWDGPDGMPVIYHGHTLTTKIKFSDVLHTIKEHAFVASEYPVILSIEDHCSIAQQRNMAQYFKKVLGDTLLTKPVEISADGLPSPNQLKRKILIKHKKLAEGSAYEEVPTSMMYSENDISNSIKNGILYLEDPVNHEWYPHYFVLTSSKIYYSEETSSDQGNEDEEEPKEVSSSTELHSNEKWFHGKLGAGRDGRHIAERLLTEYCIETGAPDGSFLVRESETFVGDYTLSFWRNGKVQHCRIHSRQDAGTPKFFLTDNLVFDSLYDLITHYQQVPLRCNEFEMRLSEPVPQTNAHESKEWYHASLTRAQAEHMLMRVPRDGAFLVRKRNEPNSYAISFRAEGKIKHCRVQQEGQTVMLGNSEFDSLVDLISYYEKHPLYRKMKLRYPINEEALEKIGTAEPDYGALYEGRNPGFYVEANPMPTFKCAVKALFDYKAQREDELTFIKSAIIQNVEKQEGGWWRGDYGGKKQLWFPSNYVEEMVNPVALEPEREHLDENSPLGDLLRGVLDVPACQIAIRPEGKNNRLFVFSISMASVAHWSLDVAADSQEELQDWVKKIREVAQTADARLTEGKIMERRKKIALELSELVVYCRPVPFDEEKIGTERACYRDMSSFPETKAEKYVNKAKGKKFLQYNRLQLSRIYPKGQRLDSSNYDPLPMWICGSQLVALNFQTPDKPMQMNQALFMTGRHCGYVLQPSTMRDEAFDPFDKSSLRGLEPCAISIEVLGARHLPKNGRGIVCPFVEIEVAGAEYDSTKQKTEFVVDNGLNPVWPAKPFHFQISNPEFAFLRFVVYEEDMFSDQNFLAQATFPVKGLKTGYRAVPLKNNYSEDLELASLLIKIDIFPAKENGDLSPFSGTSLRERGSDASGQLFHGRAREGSFESRYQQPFEDFRISQEHLADHFDSRERRAPRRTRVNGDNRL

SEQ ID NO: 126 - protein, 888 aa, homo sapiens [sequence omitted]

SEQ ID NO: 127 - protein, 146 aa, homo sapiens [sequence omitted]

SEQ ID NO: 128 - protein, 134 aa, homo sapiens
LTLDEKDPRRLFEGNALLRRLVRIGVLDEGKMKLDYILGLKIEDFLERRLQTQVFKLGLAKSIHHARVLIRQRHIRVRKQVVNIPSFIVRLDSQKHIDFSLRSPYGGGRPGRVKRKNAKKGQGGAGAGDDEEED

SEQ ID NO: 129 - protein, 156 aa, homo sapiens [sequence omitted]

SEQ ID NO: 130 - protein, 5058 aa, homo sapiens
MGHAGCQFKALLWKNWLCRLRNPVLFLAEFFWPCILFVILTVLRFQEPPRYRDICYLQPRDLPSCGVIPFVQSLLCNTGSRCRNFSYEGSMEHHFRLSRFQTAADPKKVNNLAFLKEIQDLAEEIHGMMDKAKNLKRLWVERSNTPDSSYGSSFFTMDLNKTEEVILKLESLHQQPHIWDFLLLLPRLHTSHDHVEDGMDVAVNLLQTILNSLISLEDLDWLPLNQTFSQVSELVLNVTISTLTFLQQHGVAVTEPVYHLSMQNIVWDPQKVQYDLKSQFGFDDLHTEQILNSSAELKEIPTDTSLEKMVCSVLSSTSEDEAEKWGHVGGCHPKWSEAKNYLVHAVSWLRVYQQVFVQWQQGSLLQKTLTGMGHSLEALRNQFEEESKPWKVVEALHTALLLLNDSLSADGPKDNHTFPKILQHLWKLQSLLQNLPQWPALKRFLQLDGALRNAIAQNLHFVQEVLICLETSANDFKWFELNQLKLEKDVFFWELKQMLAKNAVCPNGRFSEKEVFLPPGNSSIWGGLQGLLCYCNSSETSVLNKLLGSVEDADRILQEVITWHKNMSVLIPEEYLDWQELEMQLSEASLSCTRLFLLLGADPSPENDVFSSDCKHQLVSTVIFHTLEKTQFFLEQAYYWKAFKKFIRKTCEVAQYVNMQESFQNRLLAFPEESPCFEENMDWKMISDNYFQFLNNLLKSPTASISRALNFTKHLLMMEKKLHTLEDEQMNFLLSFVEFFEKLLLPNLFDSSIVPSFHSLPSLTEDILNISSLWTNHLKSLKRDPSATDAQKLLEFGNEVIWKMQTLGSHWIRKEPKNLLRFIELILFEINPKLLELWAYGISKGKRAKLENFFTLLNFSVPENEILSTSFNFSQLFHSDWPKSPAMNIDFVRLSEAIITSLHEFGFLEQEQISEALNTVYAIRNASDLFSALSEPQKQEVDKILTHIHLNVFQDKDSALLLQIYSSFYRYIYELLNIQSRGSSLTFLTQISKHILDIIKQFNFQNISKAFAFLFKTAEVLGGISNVSYCQQLLSIFNFLELQAQSFMSTEGQELEVIHTTLTGLKQLLIIDEDFRISLFQYMSQFFNSSVEDLLDNKCLISDNKHISSVNYSTSEESSFVFPLAQIFSNLSANVSVFNKFMSIHCTVSWLQMWTEIWETISQLFKFDMNVFTSLHHGFTQLLDELEDDVKVSKSCQGILPTHNVARLILNLFKNVTQANDFHNWEDFLDLRDFLVALGNALVSVKKLNLEQVEKSLFTMEAALHQLKTFPFNESTSREFLNSLLEVFIEFSSTSEYIVRNLDSINDFLSNNLTNYGEKFENIITELREAIVFLRNVSHDRDLFSCADIFQNVTECILEDGFLYVNTSQRMLRILDTLNSTFSSENTISSLKGCIVWLDVINHLYLLSNSSFSQGRLQNILGNFRDIENKMNSILKIVTWVLNIKKPLCSSNGSHINCVNIYLKDVTDFLNIVLTTVFEKEKKPKFEILLALLNDSTKQVRMSINNLTTDFDFASQSNWRYFTELILRPIEMSDEIPNQFQNIWLHLITLGKEFQKLVKGIYFNILENNSSSKTENLLNIFATSPKEKDVNSVGNSIYHLASYLAFSLSHDLQNSPKIIISPEIMKATGLGIQLIRDVFNSLMPVVHHTSPQNAGYMQALKKVTSVMRTLKKADIDLLVDQLEQVSVNLMDFFKNISSVGTGNLVVNLLVGLMEKFADSSHSWNVNHLLQLSRLFPKDVVDAVIDVYYVLPHAVRLLQGVPGKNITEGLKDVYSFTLLHGITISNITKEDFAIVIKILLDTIELVSDKPDIISEALACFPVVWCWNHTNSGFRQNSKIDPCNVHGLMSSSFYGKVASILDHFHLSPQGEDSPCSNESSRMEITRKVVCIIHELVDWNSILLELSEVFHVNISLVKTVQKFWHKILPFVPPSINQTRDSISELCPSGSIKQVALQIIEKLKNVNFTKVTSGENILDKLSSLNKILNINEDTETSVQNIISSNLERTVQLISEDWSLEKSTHNLLSLFMMLQNANVTGSSLEALSSFIEKSETPYNFEELWPKFQQIMKDLTQDFRIRHLLSEMNKGIKSINSMALQKITLQFAHFLEILDSPSLKTLEIIEDFLLVTKNWLQEYANEDYSRMIETLFIPVTNESSTEDIALLAKAIATFWGSLKNISRAGNFDVAFLTHLLNQEQLTNFSVVQLLFENILINLINNLAGNSQEAAWNLNDTDLQIMNFINLILNHMQSETSRKTVLSLRSIVDFTEQFLKTFFSLFLKEDSENKISLLLKYFHKDVIAEMSFVPKDKILEILKLDQFLTLMIQDRLMNIFSSLKETIYHLMKSSFILDNGEFYFDTHQGLKFMQDLFNALLRETSMKNKTENNIDFFTVVSQLFFHVNKSEDLFKLNQDLGSALHLVRECSTEMARLLDTILHSPNKDFYALYPTLQEVILANLTDLLFFINNSFPLRNRATLEITKRLVGAISRASEESHVLKPLLEMSGTLVMLLNDSADLRDLATSMDSIVKLLKLVKKVSGKMSTVFKTHFISNTKDSVKFFDTLYSIMQQSVQNLVKEIATLKKIDHFTFEKINDLLVPFLDLAFEMIGVEPYISSNSDIFSMSPSILSYMNQSKDFSDILEEIAEFLTSVKMNLEDMRSLAVAFNNETQTFSMDSVNLREEILGCLVPINNITNQMDFLYPNPISTHSGPQDIKWEIIHEVILFLDKILSQNSTEIGSFLKMVICLTLEALWKNLKKDNWNVSNVLMTFTQHPNNLLKTIETVLEASSGIKSDYEGDLNKSLYFDTPLSQNITHHQLEKAIHNVLSRIALWRKGLRFNNSEWITSTRTLFQPLFEIFIKATTGKNVTSEKEERTEKEMIDFPYSFKPFFCLEKYLGGLFVLTKYWQQIPLTDQSVVEICEVFQQTVKPSEAMEMLQKVKMMVVRVLTIVAENPSWTKDILCATLSCKQNGIRHLILSAIQGVTLAQDHFQEIEKIWSSPNQLNCESLSKNLSSTLESFKSSLENATGQDCTSQPRLETVQQHLYMLAKSLEETWSSGNPIMTFLSNFTVTEDVKIKDLMKNITKLTEELRSSIQISNETIHSILEANISHSKVLFSALTVALSGKCDQEILHLLLTFPKGEKSWIAAEELCSLPGSKVYSLIVLLSRNLDVRAFIYKTLMPSEANGLLNSLLDIVSSLSALLAKAQHVFEYLPEFLHTFKITALLETLDFQQVSQNVQARSSAFGSFQFVMKMVCKDQASFLSDSNMFINLPRVKELLEDDKEKFNIPEDSTPFCLKLYQEILQLPNGALVWTFLKPILHGKILYTPNTPEINKVIQKANYTFYIVDKLKTLSETLLEMSSLFQRSGSGQMFNQLQEALRNKFVRNFVENQLHIDVDKLTEKLQTYGGLLDEMFNHAGAGRFRFLGSILVNLSSCVALNRFQALQSVDILETKAHELLQQNSFLASIIFSNSLFDKNFRSESVKLPPHVSYTIRTNVLYSVRTDVVKNPSWKFHPQNLPADGFKYNYVFAPLQDMIERAIILVQTGQEALEPAAQTQAAPYPCHTSDLFLNNVGFFFPLIMMLTWMVSVASMVRKLVYEQEIQIEEYMRMMGVHPVIHFLAWFLENMAVLTISSATLAIVLKTSGIFAHSNTFIVFLFLLDFGMSVVMLSYLLSAFFSQANTAALCTSLVYMISFLPYIVLLVLHNQLSFVNQTFLCLLSTTAFGQGVFFITFLEGQETGIQWNNMYQALEQGGMTFGWVCWMILFDSSLYFLCGWYLSNLIPGTFGLRKPWYFPFTASYWKSVGFLVEKRQYFLSSSLFFFNENFDNKGSSLQNREGELEGSAPGVTLVSVTKEYEGHKAVVQDLSLTFYRDQITALLGTNGAGKTTIISMLTGLHPPTSGTIIINGKNLQTDLSRVRMELGVCPQQDILLDNLTVREHLLLFASIKAPQWTKKELHQQVNQTLQDVDLTQHQHKQTRALSGGLKRKLSLGIAFMGMSRTVVLDEPTSGVDPCSRHSLWDILLKYREGRTIIFTTHHLDEAEALSDRVAVLQHGRLRCCGPPFCLKEAYGQGLRLTLTRQPSVLEAHDLKDMACVTSLIKIYIPQAFLKDSSGSELTYTIPKDTDKACLKGLFQALDENLHQLHLTGYGISDTTLEEVFLMLLQDSNKKSHIALGTESELQNHRPTGHLSGYCGSLARPATVQGVQLLRAQVAAILARRLRRTLRAGKSTLADLLLPVLFVALAMGLFMVRPLATEYPPLRLTPGHYQRAETYFFSSGGDNLDLTRVLLRKFRDQDLPCADLNPRQKNSSCWRTDPFSHPEFQDSCGCLKCPNRSASAPYLTNHLGHTLLNLSGFNMEEYLLAPSEKPRLGGWSFGLKIPSEAGGANGNISKPPTLAKVWYNQKGFHSLPSYLNHLNNLILWQHLPPTVDWRQYGITLYSHPYGGALLNEDKILESIRQCGVALCIVLGFSILSASIGSSVVRDRVIGAKRLQHISGLGYRMYWFTNFLYDMLFYLVSVCLCVAVIVAFQLTAFTFRKNLAATALLLSLFGYATLPWMYLMSRIFSSSDVAFISYVSLNFIFGLCTMLITIMPRLLAIISKAKNLQNIYDVLKWVFTIFPQFCLGQGLVELCYNQIKYDLTHNFGIDSYVSPFEMNFLGWIFVQLASQGTVLLLLRVLLHWDLLRWPRGHSTLQGTVKSSKDTDVEKEEKRVFEGRTNGDILVLYNLSKHYRRFFQNIIAVQDISLGIPKGECFGLLGVNGAGKSTTFKMLNGEVSLTSGHAIIRTPMGDAVDLSSAGTAGVLIGYCPQQDALDELLTGWEHLYYYCSLRGIPRQCIPEVAGDLIRRLHLEAHADKPVATYSGGTKRKLSTALALVGKPDILLLDEPSSGMDPCSKRYLWQTIMKEVREGCAAVLTSHSMEECEALCTRLAIMVNGSFKCLGSPQHIKNRFGDGYTVKVWLCKEANQHCTVSDHLKLYFPGIQFKGQHLNLLEYHVPKRWGCLADLFKVIENNKTFLNIKHYSINQTTLEQVFINFASEQQQTLQSTLDPSTDSHHTHHLPI

SEQ ID NO: 131 - protein, 249 aa, homo sapiens
MEMGRRIHLELRNRTPSDVKELVLDNSRSNEGKLEGLTDEFEELEFLSTINVGLTSIANLPKLNKLKKLELSDNRVSGGLEVLAEKCPNLTHLNLSGNKIKDLSTIEPLKKLENLKSLDLFNCEVTNLNDYRENVFKLLPQLTYLDGYDRDDKEAPDSDAEGYVEGLDDEEEDEDEEEYDEDAQVVEDEEDEDEEEEGEEEDVSGEEEEDEEGYNDGEVDDEEDEEELGEEERGQKRKREPEDEGEDDD

SEQ ID NO: 132 - protein, 1124 aa, homo sapiens
MDPFTEKLLERTRARRENLQRKMAERPTAAPRSMTHAKRARQPLSEASNQQPLSGGEEKSCTKPSPSKKRCSDNTEVEVSNLENKQPVESTSAKSCSPSPVSPQVQPQAADTISDSVAVPASLLGMRRGLNSRLEATAASSVKTRMQKLAEQRRRWDNDDMTDDIPESSLFSPMPSEEKAASPPRPLLSNASATPVGRRGRLANLAATICSWEDDVNHSFAKQNSVQEQPGTACLSKFSSASGASARINSSSVKQEATFCSQRDGDASLNKALSSSADDASLVNASISSSVKATSPVKSTTSITDAKSCEGQNPELLPKTPISPLKTGVSKPIVKSTLSQTVPSKGELSREICLQSQSKDKSTTPGGTGIKPFLERFGERCQEHSKESPARSTPHRTPIITPNTKAIQERLFKQDTSSSTTHLAQQLKQERQKELACLRGRFDKGNIWSAEKGGNSKSKQLETKQETHCQSTPLKKHQGVSKTQSLPVTEKVTENQIPAKNSSTEPKGFTECEMTKSSPLKITLFLEEDKSLKVTSDPKVEQKIEVIREIEMSVDDDDINSSKVINDLFSDVLEEGELDMEKSQEEMDQALAESSEEQEDALNISSMSLLAPLAQTVGVVSPESLVSTPRLELKDTSRSDESPKPGKFQRTRVPRAESGDSLGSEDRDLLYSIDAYRSQRFKETERPSIKQVIVRKEDVTSKLDEKNNAFPCQVNIKQKMQELNNEINMQQTVIYQASQALNCCVDEEHGKGSLEEAEAERLLLIATGKRTLLIDELNKLKNEGPQRKNKASPQSEFMPSKGSVTLSEIRLPLKADFVCSTVQKPDAANYYYLIILKAGAENMVATPLASTSNSLNGDALTFTTTFTLQDVSNDFEINIEVYSLVQKKDPSGLDKKKKTSKSKAITPKRLLTSITTKSNIHSSVMASPGGLSAVRTSNFALVGSYTLSLSSVGNTKFVLDKVPFLSSLEGHIYLKIKCQVNSSVEERGFLTIFEDVSGFGAWHRRWCVLSGNCISYWTYPDDEKRKNPIGRINLANCTSRQIEPANREFCARRNTFELITVRPQREDDRETLVSQCRDTLCVTKNWLSADTKEERDLWMQKLNQVLVDIRLWQPDACYKPIGKP

SEQ ID NO: 133 - protein, 859 aa, homo sapiens
MEPLSHRGLPRLSWIDTLYSNFSYGTDEYDGEGNEEQKGPPEGSETMPYIDESPTMSPQLSARSQGRGDGVSPTPPEGLAPGVEAGKGLEMRKLVLSGFLASEEIYINQLEALLLPMKPLKATATTSQPVLTIQQIETIFYKIQDIYEIHKEFYDNLCPKVQQWDSQVTMGHLFQKLASQLGVYKAFVDNYKVALETAEKCSQSNNQFQKISEELKVKGPKDSKDSHTSVTMEALLYKPIDRVTRSTLVLHDLLKHTPVDHPDYPLLQDALRISQNFLSSINEDIDPRRTAVTTPKGETRQLVKDGFLVEVSESSRKLRHVFLFTDVLLCAKLKKTSAGKHQQYDCKWYIPLADLVFPSPEESEASPQVHPFPDHELEDMKMKISALKSEIQKEKANKGQSRAIERLKKKMFENEFLLLLNSPTIPFRIHNRNGKSYLFLLSSDYERSEWREAIQKLQKKDLQAFVLSSVELQVLTGSCFKLRTVHNIPVTSNKDDDESPGLYGFLHVIVHSAKGFKQSANLYCTLEVDSFGYFVSKAKTRVFRDTAEPKWDEEFEIELEGSQSLRILCYEKCYDKTKVNKDNNEIVDKIMGKGQIQLDPQTVETKNWHTDVIEMNGIKVEFSMKFTSRDMSLKRTPSKKQTGVFGVKISVVTKRERSKVPYIVRQCVEEVEKRGIEEVGIYRISGVATDIQALKAVFDANNKDILLMLSDMDINAIAGTLKLYFRELPEPLLTDRLYPAFMEGIALSDPAAKENCMMHLLRSLPDPNLITFLFLLEHLKRVAEKEPINKMSLHNLATVFGPTLLRPSEVESKAHLTSAADIWSHDVMAQVQVLLYYLQHPPISFAELKRNTLYFSTDV

SEQ ID NO: 134 - protein, 513 aa, homo sapiens
MGAAAKLAFAVFLISCSSGAILGRSETQECLFFNANWEKDRTNQTGVEPCYGDKDKRRHCFATWKNISGSIEIVKQGCWLDDINCYDRTDCVEKKDSPEVYFCCCEGNMCNEKFSYFPEMEVTQPTSNPVTPKPPYYNILLYSLVPLMLIAGIVICAFWVYRHHKMAYPPVLVPTQDPGPPPPSPLLGLKPLQLLEVKARGRFGCVWKAQLLNEYVAVKIFPIQDKQSWQNEYEVYSLPGMKHENILQFIGAEKRGTSVDVDLWLITAFHEKGSLSDFLKANVVSWNELCHIAETMARGLAYLHEDIPGLKDGHKPAISHRDIKSKNVLLKNNLTACIADFGLALKFEAGKSAGDTHGQVGTRRYMAPEVLEGAINFQRDAFLRIDMYAMGLVLWELASRCTAADGPVDEYMLPFEEEIGQHPSLEDMQEVVVHKKKRPVLRDYWQKHAGMAMLCETIEECWDHDAEARLSAGCVGERITQMQRLTNIITTEDIVTVVTMVTNVDFPPKESSL

SEQ ID NO: 135 - protein, 1124 aa, homo sapiens
MDSLASLVLCGVSLLLSGTVEGAMDLILINSLPLVSDAETSLTCIASGWRPHEPITIGRDFEALMNQHQDPLEVTQDVTREWAKKVVWKREKASKINGAYFCEGRVRGEAIRIRTMKMRQQASFLPATLTMTVDKGDNVNISFKKVLIKEEDAVIYKNGSFIHSVPRHEVPDILEVHLPHAQPQDAGVYSARYIGGNLFTSAFTRLIVRRCEAQKWGPECNHLCTACMNNGVCHEDTGECICPPGFMGRTCEKACELHTFGRTCKERCSGQEGCKSYVFCLPDPYGCSCATGWKGLQCNEACHPGFYGPDCKLRCSCNNGEMCDRFQGCLCSPGWQGLQCEREGIPRMTPKIVDLPDHIEVNSGKFNPICKASGWPLPTNEEMTLVKPDGTVLHPKDFNHTDHFSVAIFTIHRILPPDSGVWVCSVNTVAGMVEKPFNISVKVLPKPLNAPNVIDTGHNFAVINISSEPYFGDGPIKSKKLLYKPVNHYEAWQHIQVTNEIVTLNYLEPRTEYELCVQLVRRGEGGEGHPGPVRRFTTASIGLPPPRGLNLLPKSQTTLNLTWQPIFPSSEDDFYVEVERRSVQKSDQQNIKVPGNLTSVLLNNLHPREQYVVRARVNTKAQGEWSEDLTAWTLSDILPPQPENIKISNITHSSAVISWTILDGYSISSITIRYKVQGKNEDQHVDVKIKNATIIQYQLKGLEPETAYQVDIFAENNIGSSNPAFSHELVTLPESQAPADLGGGKMLLIAILGSAGMTCLTVLLAFLIILQLKRANVQRRMAQAFQNVREEPAVQFNSGTLALNRKVKNNPDPTIYPVLDWNDIKFQDVIGEGNFGQVLKARIKKDGLRMDAAIKRMKEYASKDDHRDFAGELEVLCKLGHHPNIINLLGACEHRGYLYLAIEYAPHGNLLDFLRKSRVLETDPAFAIANSTASTLSSQQLLHFAADVARGMDYLSQKQFIHRDLAARNILVGENYVAKIADFGLSRGQEVYVKKTMGRLPVRWMAIESLNYSVYTTNSDVWSYGVLLWEIVSLGGTPYCGMTCAELYEKLPQGYRLEKPLNCDDEVYDLMRQCWREKPYERPSFAQILVSLNRMLEERKTYVNTTLYEKFTYAGIDCSAEEAA

SEQ ID NO: 136 - protein, 323 aa, homo sapiens
MASIWVGHRGTVRDYPDFSPSVDAEAIQKAIRGIGTDEKMLISILTERSNAQRQLIVKEYQAAYGKELKDDLKGDLSGHFEHLMVALVTPPAVFDAKQLKKSMKGAGTNEDALIEILTTRTSRQMKDISQAYYTVYKKSLGDDISSETSGDFRKALLTLADGRRDESLKVDEHLAKQDAQILYKAGENRWGTDEDKFTEILCLRSFPQLKLTFDEYRNISQKDIVDSIKGELSGHFEDLLLAIVNCVRNTPAFLAERLHRALKGIGTDEFTLNRIMVSRSEIDLLDIRTEFKKHYGYSLYSAIKSDTSGDYEITLLKICGGDD

SEQ ID NO: 137 - protein, 529 aa, homo sapiens
MLGFVGRVAAAPASGALRRLTPSASLPPAQLLLRAAPTAVHPVRDYAAQTSPSPKAGAATGRIVAVIGAVVDVQFDEGLPPILNALEVQGRETRLVLEVAQHLGESTVRTIAMDGTEGLVRGQKVLDSGAPIKIPVGPETLGRIMNVIGEPIDERGPIKTKQFAPIHAEAPEFMEMSVEQEILVTGIKVVDLLAPYAKGGKIGLFGGAGVGKTVLIMELINNVAKAHGGYSVFAGVGERTREGNDLYHEMIESGVINLKDATSKVALVYGQMNEPPGARARVALTGLTVAEYFRDQEGQDVLLFIDNIFRFTQAGSEVSALLGRIPSAVGYQPTLATDMGTMQERITTTKKGSITSVQAIYVPADDLTDPAPATTFAHLDATTVLSRAIAELGIYPAVDPLDSTSRIMDPNIVGSEHYDVARGVQKILQDYKSLQDIIAILGMDELSEEDKLTVSRARKIQRFLSQPFQVAEVFTGHMGKLVPLKETIKGFQQILAGEYDHLPEQAFYMVGPIEEAVAKADKLAEEHSS

SEQ ID NO: 138 - protein, 1624 aa, homo sapiens
MSKRRMSVGQQTWALLCKNCLKKWRMKRQTLLEWLFSFLLVLFLYLFFSNLHQVHDTPQMSSMDLGRVDSFNDTNYVIAFAPESKTTQEIMNKVASAPFLKGRTIMGWPDEKSMDELDLNYSIDAVRVIFTDTFSYHLKFSWGHRIPMMKEHRDHSAHCQAVNEKMKCEGSEFWEKGFVAFQAAINAAIIEIATNHSVMEQLMSVTGVHMKILPFVAQGGVATDFFIFFCIISFSTFIYYVSVNVTQERQYITSLMTMMGLRESAFWLSWGLMYAGFILIMATLMALIVKSAQIVVLTGFVMVFTLFLLYGLSLITLAFLMSVLIKKPFLTGLVVFLLIVFWGILGFPALYTRLPAFLEWTLCLLSPFAFTVGMAQLIHLDYDVNSNAHLDSSQNPYLIIATLFMLVFDTLLYLVLTLYFDKILPAEYGHRCSPLFFLKSCFWFQHGRANHVVLENETDSDPTPNDCFEPVSPEFCGKEAIRIKNLKKEYAGKCERVEALKGVVFDIYEGQITALLGHSGAGKTTLLNILSGLSVPTSGSVTVYNHTLSRMADIENISKFTGFCPQSNVQFGFLTVKENLRLFAKIKGILPHEVEKEVQRVVQELEMENIQDILAQNLSGGQNRKLTFGIAILGDPQVLLLDEPTAGLDPLSRHRIWNLLKEGKSDRVILFSTQFIDEADILADRKVFISNGKLKCAGSSLFLKKKWGIGYHLSLHLNERCDPESITSLVKQHISDAKLTAQSEEKLVYILPLERTNKFPELYRDLDRCSNQGIEDYGVSITTLNEVFLKLEGKSTIDESDIGIWGQLQTDGAKDIGSLVELEQVLSSFHETRKTISGVALWRQQVCAIAKVRFLKLKKERKSLWTILLLFGISFIPQLLEHLFYESYQKSYPWELSPNTYFLSPGQQPQDPLTHLLVINKTGSTIDNFLHSLRRQNIAIEVDAFGTRNGTDDPSYNGAIIVSGDEKDHRFSIACNTKRLNCFPVLLDVISNGLLGIFNSSEHIQTDRSTFFEEHMDYEYGYRSNTFFWIPMAASFTPYIAMSSIGDYKKKAHSQLRISGLYPSAYWFGQALVDVSLYFLILLLMQIMDYIFSPEEIIFIIQNLLIQILCSIGYVSSLVFLTYVISFIFRNGRKNSGIWSFFFLIVVIFSIVATDLNEYGFLGLFFGTMLIPPFTLIGSLFIFSEISPDSMDYLGASESEIVYLALLIPYLHFLIFLFILRCLEMNCRKKLMRKDPVFRISPRSNAIFPNPEEPEGEEEDIQMERMRTVNAMAVRDFDETPVIIASCLRKEYAGKKKNCFSKRKKKIATRNVSFCVKKGEVIGLLGHNGAGKSTTIKMITGDTKPTAGQVILKGSGGGEPLGFLGYCPQENALWPNLTVRQHLEVYAAVKGLRKGDAMIAITRLVDALKLQDQLKAPVKTLSEGIKRKLCFVLSILGNPSVVLLDEPSTGMDPEGQQQMWQVIRATFRNTERGALLTTHYMAEAEAVCDRVAIMVSGRLRCIGSIQHLKSKFGKDYLLEMKLKNLAQMEPLHAEILRLFPQAAQQERFSSLMVYKLPVEDVRPLSQAFFKLEIVKQSFDLEEYSLSQSTLEQVFLELSKEQELGDLEEDFDPSVKWKLLLQEEP

SEQ ID NO: 139 - protein, 2436 aa, homo sapiens [sequence omitted]

SEQ ID NO: 140 - protein, 4624 aa, homo sapiens
MFRIGRRQLWKHSVTRVLTQRLKGEKEAKRALLDARHNYLFAIVASCLDLNKTEVEDAILEGNQIERIDQLFAVGGLRHLMFYYQDVEEAETGQLGSLGGVNLVSGKIKKPKVFVTEGNDVALTGVCVFFIRTDPSKAITPDNIHQEVSFNMLDAADGGLLNSVRRLLSDIFIPALRATSHGWGELEGLQDAANIRQEFLSSLEGFVNVLSGAQESLKEKVNLRKCDILELKTLKEPTDYLTLANNPETLGKIEDCMKVWIKQTEQVLAENNQLLKEADDVGPRAELEHWKKRLSKFNYLLEQLKSPDVKAVLAVLAAAKSKLLKTWREMDIRITDATNEAKDNVKYLYTLEKCCDPLYSSDPLSMMDAIPTLINAIKMIYSISHYYNTSEKITSLFVKVTNQIISACKAYITNNGTASIWNQPQDVVEEKILSAIKLKQEYQLCFHKTKQKLKQNPNAKQFDFSEMYIFGKFETFHRRLAKIIDIFTTLKTYSVLQDSTIEGLEDMATKYQGIVATIKKKEYNFLDQRKMDFDQDYEEFCKQTNDLHNELRKFMDVTFAKIQNTNQALRMLKKFERLNIPNLGIDDKYQLILENYGADIDMISKLYTKQKYDPPLARNQPPIAGKILWARQLFHRIQQPMQLFQQHPAVLSTAEAKPIIRSYNRMAKVLLEFEVLFHRAWLRQIEEIHVGLEASLLVKAPGTGELFVNFDPQILILFRETECMAQMGLEVSPLATSLFQKRDRYKRNFSNMKMMLAEYQRVKSKIPAAIEQLIVPHLAKVDEALQPGLAALTWTSLNIEAYLENTFAKIKDLELLLDRVNDLIEFRIDAILEEMSSTPLCQLPQEEPLTCEEFLQMTKDLCVNGAQILHFKSSLVEEAVNELVNMLLDVEVLSEEESEKISNENSVNYKNESSAKREEGNFDTLTSSINARANALLLTTVTRKKKETEMLGEEARELLSHFNHQNMDALLKVTRNTLEAIRKRIHSSHTINFRDSNSASNMKQNSLPIFRASVTLAIPNIVMAPALEDVQQTLNKAVECIISVPKGVRQWSSELLSKKKIQERKMAALQSNEDSDSDVEMGENELQDTLEIASVNLPIPVQTKNYYKNVSENKEIVKLVSVLSTIINSTKKEVITSMDCFKRYNHIWQKGKEEAIKTFITQSPLLSEFESQILYFQNLEQEINAEPEYVCVGSIALYTADLKFALTAETKAWMVVIGRHCNKKYRSEMENIFMLIEEFNKKLNRPIKDLDDIRIAMAALKEIREEQISIDFQVGPIEESYALLNRYGLLIAREEIDKVDTLHYAWEKLLARAGEVQNKLVSLQPSFKKELISAVEVFLQDCHQFYLDYDLNGPMASGLKPQEASDRLIMFQNQFDNIYRKYITYTGGEELFGLPATQYPQLLEIKKQLNLLQKIYTLYNSVIETVNSYYDILWSEVNIEKINNELLEFQNRCRKLPRALKDWQAFLDLKKIIDDFSECCPLLEYMASKAMMERHWERITTLTGHSLDVGNESFKLRNIMEAPLLKYKEEIEDICISAVKERDIEQKLKQVINEWDNKTFTFGSFKTRGELLLRGDSTSEIIANMEDSLMLLGSLLSNRYNMPFKAQIQKWVQYLSNSTDIIESWMTVQNLWIYLEAVFVGGDIAKQLPKEAKRFSNIDKSWVKIMTRAHEVPSVVQCCVGDETLGQLLPHLLDQLEICQKSLTGYLEKKRLCFPRFFFVSDPALLEILGQASDSHTIQAHLLNVFDNIKSVKFHEKIYDRILSISSQEGETIELDKPVMAEGNVEVWLNSLLEESQSSLHLVIRQAAANIQETGFQLTEFLSSFPAQVGLLGIQMIWTRDSEEALRNAKFDKKIMQKTNQAFLELLNTLIDVTTRDLSSTERVKYETLITIHVHQRDIFDDLCHMHIKSPMDFEWLKQCRFYFNEDSDKMMIHITDVAFIYQNEFLGCTDRLVITPLTDRCYITLAQALGMSMGGAPAGPAGTGKTETTKDMGRCLGKYVVVFNCSDQMDFRGLGRIFKGLAQSGSWGCFDEFNRIDLPVLSVAAQQISIILTCKKEHKKSFIFTDGDNVTMNPEFGLFLTMNPGYAGRQELPENLKINFRSVAMMVPDRQIIIRVKLASCGFIDNVVLARKFFTLYKLCEEQLSKQVHYDFGLRNILSVLRTLGAAKRANPMDTESTIVMRVLRDMNLSKLIDEDEPLFLSLIEDLFPNILLDKAGYPELEAAISRQVEEAGLINHPPWKLKVIQLFETQRVRHGMMTLGPSGAGKTTCIHTLMRAMTDCGKPHREMRMNPKAITAPQMFGRLDVATNDWTDGIFSTLWRKTLRAKKGEHIWIILDGPVDAIWIENLNSVLDDNKTLTLANGDRIPMAPNCKIIFEPHNIDNASPATVSRNGMVFMSSSILDWSPILEGFLKKRSPQEAEILRQLYTESFPDLYRFCIQNLEYKMEVLEAFVITQSINMLQGLIPLKEQGGEVSQAHLGRLFVFALLWSAGAALELDGRRRLELWLRSRPTGTLELPPPAGPGDTAFDYYVAPDGTWTHWNTRTQEYLYPSDTTPEYGSILVPNVDNVRTDFLIQTIAKQGKAVLLIGEQGTAKTVIIKGFMSKYDPECHMIKSLNFSSATTPLMFQRTIESYVDKRMGTTYGPPAGKKMTVFIDDVNMPIINEWGDQVTNEIVRQLMEQNGFYNLEKPGEFTSIVDIQFLAAMIHPGGGRNDIPQRLKRQFSIFNCTLPSEASVDKIFGVIGVGHYCTQRGFSEEVRDSVTKLVPLTRRLWQMTKIKMLPTPAKFHYVFNLRDLSRVWQGMLNTTSEVIKEPNDLLKLWKHECKRVIADRFTVSSDVTWFDKALVSLVEEEFGEEKKLLVDCGIDTYFVDFLRDAPEAAGETSEEADAETPKIYEPIESFSHLKERLNMFLQLYNESIRGAGMDMVFFADAMVHLVKISRVIRTPQGNALLVGVGGSGKQSLTRLASFIAGYVSFQITLTRSYNTSNLMEDLKVLYRTAGQQGKGITFIFTDNEIKDESFLEYMNNVLSSGEVSNLFARDEIDEINSDLASVMKKEFPRCLPTNENLHDYFMSRVRQNLHIVLCFSPVGEKFRNRALKFPALISGCTIDWFSRWPKDALVAVSEHFLTSYDIDCSLEIKKEVVQCMGSFQDGVAEKCVDYFQRFRRSTHVTPKSYLSFIQGYKFIYGEKHVEVRTLANRMNTGLEKLKEASESVAALSKELEAKEKELQVANDKADMVLKEVTMKAQAAEKVKAEVQKVKDRAQAIVDSISKDKAIAEEKLEAAKPALEEAEAALQTIRPSDIATVRTLGRPPHLIMRIMDCVLLLFQRKVSAVKIDLEKSCTMPSWQESLKLMTAGNFLQNLQQFPKDTINEEVIEFLSPYFEMPDYNIETAKRVCGNVAGLCSWTKAMASFFSINKEVLPLKANLVVQENRHLLAMQDLQKAQAELDDKQAELDVVQAEYEQAMTEKQTLLEDAERCRHKMQTASTLISGLAGEKERWTEQSQEFAAQTKRLVGDVLLATAFLSYSGPFNQEFRDLLLNDWRKEMKARKIPFGKNLNLSEMLIDAPTISEWNLQGLPNDDLSIQNGIIVTKASRYPLLIDPQTQGKIWIKNKESRNELQITSLNHKYFRNHLEDSLSLGRPLLIEDVGEELDPALDNVLERNFIKTGSTFKVKVGDKEVDVLDGFRLYITTKLPNPAYTPEISARTSIIDFTVTMKGLEDQLLGRVILTEKQELEKERTHLMEDVTANKRRMKELEDNLLYRLTSTQGSLVEDESLIVVLSNTKRTAEEVTQKLEISAETEVQINSAREEYRPVATRGSILYFLITEMRLVNEMYQTSLRQFLGLFDLSLARSVKSPITSKRIANIIEHMTYEVYKYAARGLYEEHKFLFTLLLTLKIDIQRNRVKHEEFLTLIKGGASLDLKACPPKPSKWILDITWLNLVELSKLRQFSDVLDQISRNEKMWKIWFDKENPEEEPLPNAYDKSLDCFRRLLLIRSWCPDRTIAQARKYIVDSMGEKYAEGVILDLEKTWEESDPRTPLICLLSMGSDPTDSIIALGKRLKIETRYVSMGQGQEVHARKLLQQTMANGGWALLQNCHLGLDFMDELMDIIIETELVHDAFRLWMTTEAHKQFPITLLQMSIKFANDPPQGLRAGLKRTYSGVSQDLLDVSSGSQWKPMLYAVAFLHSTVQERRKFGALGWNIPYEFNQADFNATVQFIQNHLDDMDVKKGVSWTTIRYMIGEIQYGGRVTDDYDKRLLNTFAKVWFSENMFGPDFSFYQGYNIPKCSTVDNYLQYIQSLPAYDSPEVFGLHPNADITYQSKLAKDVLDTILGIQPKDTSGGGDETREAVVARLADDMLEKLPPDYVPFEVKERLQKMGPFQPMNIFLRQEIDRMQRVLSLVRSTLTELKLAIDGTIIMSENLRDALDCMFDARIPAWWKKASWISSTLGFWFTELIERNSQFTSWVFNGRPHCFWMTGFFNPQGFLTAMRQEITRANKGWALDNMVLCNEVTKWMKDDISAPPTEGVYVYGLYLEGAGWDKRNMKLIESKPKVLFELMPVIRIYAENNTLRDPRFYSCPIYKKPVRTDLNYIAAVDLRTAQTPEHWVLRGVALLCDVK

SEQ ID NO: 141 - protein, 781 aa, homo sapiens
MATQADLMELDMAMEPDRKAAVSHWQQQSYLDSGIHSGATTTAPSLSGKGNPEEEDVDTSQVLYEWEQGFSQSFTQEQVADIDGQYAMTRAQRVRAAMFPETLDEGMQIPSTQFDAAHPTNVQRLAEPSQMLKHAVVNLINYQDDAELATRAIPELTKLLNDEDQVVVNKAAVMVHQLSKKEASRHAIMRSPQMVSAIVRTMQNTNDVETARCTAGTLHNLSHHREGLLAIFKSGGIPALVKMLGSPVDSVLFYAITTLHNLLLHQEGAKMAVRLAGGLQKMVALLNKTNVKFLAITTDCLQILAYGNQESKLIILASGGPQALVNIMRTYTYEKLLWTTSRVLKVLSVCSSNKPAIVEAGGMQALGLHLTDPSQRLVQNCLWTLRNLSDAATKQEGMEGLLGTLVQLLGSDDINVVTCAAGILSNLTCNNYKNKMMVCQVGGIEALVRTVLRAGDREDITEPAICALRHLTSRHQEAEMAQNAVRLHYGLPVVVKLLHPPSHWPLIKATVGLIRNLALCPANHAPLREQGAIPRLVQLLVRAHQDTQRRTSMGGTQQQFVEGVRMEEIVEGCTGALHILARDVHNRIVIRGLNTIPLFVQLLYSPIENIQRVAAGVLCELAQDKEAAEAIEAEGATAPLTELLHSRNEGVATYAAAVLFRMSEDKPQDYKKRLSVELTSSLFRTEPMAWNETADLGLDIGAQGEPLGYRQDDPSYRSFHSGGYGQDALGMDPMMEHEMGGHHPGADYPVDGLPDLGHAQDLMDGLPPGDSNQLAWFDTDL

SEQ ID NO: 142 - protein, 2177 aa, homo sapiens
MEEILRKLQKEASGSKYKAIKESCTWALETLGGLDTIVKIPPHVLREKCLLPLQLALESKNVKLAQHALAGMQKLLSEERFVSMETDSDEKQLLNQILNAVKVTPSLNEDLQVEVMKVLLCITYTPTFDLNGSAVLKIAEVCIETYISSCHQRSINTAVRATLSQMLSDLTLQLRQRQENTIIENPDVPQDFGNQGSTVESLCDDVVSVLTVLCEKLQAAINDSQQLQLLYLECILSVLSSSSSSMHLHRRFTDLIWKNLCPALIVILGNPIHDKTITSAHTSSTSTSLESDSASPGVSDHGRGSGCSCTAPALSGPVARTIYYIAAELVRLVGSVDSMKPVLQSLYHRVLLYPPPQHRVEAIKIMKEILGSPQRLCDLAGPSSTESESRKRSISKRKSHLDLLKLIMDGMTEACIKGGIEACYAAVSCVCTLLGALDELSQGKGLSEGQVQLLLLRLEELKDGAEWSRDSMEINEADFRWQRRVLSSEHTPWESGNERSLDISISVTTDTGQTTLEGELGQTTPEDHSGNHKNSLKSPAIPEGKETLSKVLETEAVDQPDVVQRSHTVPYPDITNFLSVDCRTRSYGSRYSESNFSVDDQDLSRTEFDSCDQYSMAAEKDSGRSDVSDIGSDNCSLADEEQTPRDCLGHRSLRTAALSLKLLKNQEADQHSARLFIQSLEGLLPRLLSLSNVEEVDTALQNFASTFCSGMMHSPGFDGNSSLSFQMLMNADSLYTAAHCALLLNLKLSHGDYYRKRPTLAPGVMKDFMKQVQTSGVLMVFSQAWIEELYHQVLDRNMLGEAGYWGSPEDNSLPLITMLTDIDGLESSAIGGQLMASAATESPFAQSRRIDDSTVAGVAFARYILVGCWKNLIDTLSTPLTGRMAGSSKGLAFILGAEGIKEQNQKERDAICMSLDGLRKAARLSCALGVAANCASALAQMAAASCVQEEKEEREAQEPSDAITQVKLKVEQKLEQIGKVQGVWLHTAHVLCMEAILSVGLEMGSHNPDCWPHVFRVCEYVGTLEHNHFSDGASQPPLTISQPQKATGSAGLLGDPECEGSPPEHSPEQGRSLSTAPVVQPLSIQDLVREGSRGRASDFRGGSLMSGSSAAKVVLTLSTQADRLFEDATDKLNLMALGGFLYQLKKASQSQLFHSVTDTVDYSLAMPGEVKSTQDRKSALHLFRLGNAMLRIVRSKARPLLHVMRCWSLVAPHLVEAACHKERHVSQKAVSFIHDILTEVLTDWNEPPHFHFNEALFRPFERIMQLELCDEDVQDQVVTSIGELVEVCSTQIQSGWRPLFSALETVHGGNKSEMKEYLVGDYSMGKGQAPVFDVFEAFLNTDNIQVFANAATSYIMCLMKFVKGLGEVDCKEIGDCAPAPGAPSTDLCLPALDYLRRCSQLLAKIYKMPLKPIFLSGRLAGLPRRLQEQSASSEDGIESVLSDFDDDTGLIEVWIILLEQLTAAVSNCPRQHQPPTLDLLFELLRDVTKTPGPGFGIYAVVHLLLPVMSVWLRRSHKDHSYWDMASANFKHAIGLSCELVVEHIQSFLHSDIRYESMINTMLKDLFELLVACVAKPTETISRVGCSCIRYVLVTAGPVFTEEMWRLACCALQDAFSATLKPVKDLLGCFHSGTESFSGEGCQVRVAAPSSSPSAEAEYWRIRAMAQQVFMLDTQCSPKTPNNFDHAQSCQLIIELPPDEKPNGHTKKSVSFREIVVSLLSHQVLLQNLYDILLEEFVKGPSPGEEKTIQVPEAKLAGFLRYISMQNLAVIFDLLLDSYRTAREFDTSPGLKCLLKKVSGIGGAANLYRQSAMSFNIYFHALVCAVLTNQETITAEQVKKVLFEDDERSTDSSQQCSSEDEDIFEETAQVSPPRGKEKRQWRARMPLLSVQPVSNADWVWLVKRLHKLCMELCNNYIQMHLDLENCMEEPPIFKGDPFFILPSFQSESSTPSTGGFSGKETPSEDDRSQSREHMGESLSLKAGGGDLLLPPSPKVEKKDPSRKKEWWENAGNKIYTMAADKTISKLMTEYKKRKQQHNLSAFPKEVKVEKKGEPLGPRGQDSPLLQRPQHLMDQGQMRHSFSAGPELLRQDKRPRSGSTGSSLSVSVRDAEAQIQAWTNMVLTVLNQIQILPDQTFTALQPAVFPCISQLTCHVTDIRVRQAVREWLGRVGRVYDIIV

SEQ ID NO: 143 - protein, 188 aa, homo sapiens [sequence omitted]

SEQ ID NO: 144 - protein, 1380 aa, homo sapiens
MASGRDERPPWRLGRLLLLMCLLLLGSSARAAHIKKAEATTTTTSAGAEAAEGQFDRYYHEEELESALREAAAAGLPGLARLFSIGRSVEGRPLWVLRLTAGLGSLIPEGDAGPDAAGPDAAGPLLPGRPQVKLVGNMHGDETVSRQVLIYLARELAAGYRRGDPRLVRLLNTTDVYLLPSLNPDGFERAREGDCGFGDGGPSGASGRDNSRGRDLNRSFPDQFSTGEPPALDEVPEVRALIEWIRRNKFVLSGNLHGGSVVASYPFDDSPEHKATGIYSKTSDDEVFKYLAKAYASNHPIMKTGEPHCPGDEDETFKDGITNGAHWYDVEGGMQDYNYVWANCFEITLELSCCKYPPASQLRQEWENNRESLITLIEKVHIGVKGFVKDSITGSGLENATISVAGINHNITTGRFGDFYRLLVPGTYNLTVVLTGYMPLTVTNVVVKEGPATEVDFSLRPTVTSVIPDTTEAVSTASTVAIPNILSGTSSSYQPIQPKDFHHHHFPDMEIFLRRFANEYPNITRLYSLGKSVESRELYVMEISDNPGVHEPGEPEFKYIGNMHGNEVVGRELLLNLIEYLCKNFGTDPEVTDLVHNTRIHLMPSMNPDGYEKSQEGDSISVIGRNNSNNFDLNRNFPDQFVQITDPTQPETIAVMSWMKSYPFVLSANLHGGSLVVNYPFDDDEQGLATYSKSPDDAVFQQIALSYSKENSQMFQGRPCKNMYPNEYFPHGITNGASWYNVPGGMQDWNYLQTNCFEVTIELGCVKYPLEKELPNFWEQNRRSLIQFMKQVHQGVRGFVLDATDGRGILNATISVAEINHPVTTYKTGDYWRLLVPGTYKITASARGYNPVTKNVTVKSEGAIQVNFTLVRSSTDSNNESKKGKGASSSTNDASDPTTKEFETLIKDLSAENGLESLMLRSSSNLALALYRYHSYKDLSEFLRGLVMNYPHITNLTNLGQSTEYRHIWSLEISNKPNVSEPEEPKIRFVAGIHGNAPVGTELLLALAEFLCLNYKKNPAVTQLVDRTRIVIVPSLNPDGRERAQEKDCTSKIGQTNARGKDLDTDFTNNASQPETKAIIENLIQKQDFSLSVALDGGSMLVTYPYDKPVQTVENKETLKHLASLYANNHPSMHMGQPSCPNKSDENIPGGVMRGAEWHSHLGSMKDYSVTYGHCPEITVYTSCCYFPSAARLPSLWADNKRSLLSMLVEVHKGVHGFVKDKTGKPISKAVIVLNEGIKVQTKEGGYFHVLLAPGVHNIIAIADGYQQQHSQVFVHHDAASSVVIVFDTDNRIFGLPRELVVTVSGATMSALILTACIIWCICSIKSNRHKDGFHRLRQHHDEYEDEIRMMSTGSKKSLLSHEFQDETDTEEETLYSSKH

SEQ ID NO: 145 - protein, 681 aa, homo sapiens
MSKTFLRPKVSSTKVTDWVDPSFDDFLECSGVSTITATSLGVNNSSHRRKNGPSTLESSRFPARKRGNLSSLEQIYGLENSKEYLSENEPWVDKYKPETQHELAVHKKKIEEVETWLKAQVLERQPKQGGSILLITGPPGCGKTTTLKILSKEHGIQVQEWINPVLPDFQKDDFKGMFNTESSFHMFPYQSQIAVFKEFLLRATKYNKLQMLGDDLRTDKKIILVEDLPNQFYRDSHTLHEVLRKYVRIGRCPLIFIISDSLSGDNNQRLLFPKEIQEECSISNISFNPVAPTIMMKFLNRIVTIEANKNGGKITVPDKTSLELLCQGCSGDIRSAINSLQFSSSKGENNLRPRKKGMSLKSDAVLSKSKRRKKPDRVFENQEVQAIGGKDVSLFLFRALGKILYCKRASLTELDSPRLPSHLSEYERDTLLVEPEEVVEMSHMPGDLFNLYLHQNYIDFFMEIDDIVRASEFLSFADILSGDWNTRSLLREYSTSIATRGVMHSNKARGYAHCQGGGSSFRPLHKPQWFLINKKYRENCLAAKALFPDFCLPALCLQTQLLPYLALLTIPMRNQAQISFIQDIGRLPLKRHFGRLKMEALTDREHGMIDPDSGDEAQLNGGHSAEESLGEPTQATVPETWSLPLSQNSASELPASQPQPFSAQGDMEENIIIEDYESDGT

SEQ ID NO: 146 - protein, 3210 aa, homo sapiens
MSWALEEWKEGLPTRALQKIQELEGQLDKLKKEKQQRQFQLDSLEAALQKQKQKVENEKTEGTNLKRENQRLMEICESLEKTKQKISHELQVKESQVNFQEGQLNSGKKQIEKLEQELKRCKSELERSQQAAQSADVSLNPCNTPQKIFTTPLTPSQYYSGSKYEDLKEKYNKEVEERKRLEAEVKALQAKKASQTLPQATMNHRDIARHQASSSVFSWQQEKTPSHLSSNSQRTPIRRDFSASYFSGEQEVTPSRSTLQIGKRDANSSFFDNSSSPHLLDQLKAQNQELRNKINELELRLQGHEKEMKGQVNKFQELQLQLEKAKVELIEKEKVLNKCRDELVRTTAQYDQASTKYTALEQKLKKLTEDLSCQRQNAESARCSLEQKIKEKEKEFQEELSRQQRSFQTLDQECIQMKARLTQELQQAKNMHNVLQAELDKLTSVKQQLENNLEEFKQKLCRAEQAFQASQIKENELRRSMEEMKKENNLLKSHSEQKAREVCHLEAELKNIKQCLNQSQNFAEEMKAKNTSQETMLRDLQEKINQQENSLTLEKLKLAVADLEKQRDCSQDLLKKREHHIEQLNDKLSKTEKESKALLSALELKKKEYEELKEEKTLFSCWKSENEKLLTQMESEKENLQSKINHLETCLKTQQIKSHEYNERVRTLEMDRENLSVEIRNLHNVLDSKSVEVETQKLAYMELQQKAEFSDQKHQKEIENMCLKTSQLTGQVEDLEHKLQLLSNEIMDKDRCYQDLHAEYESLRDLLKSKDASLVTNEDHQRSLLAFDQQPAMHHSFANIIGEQGSMPSERSECRLEADQSPKNSAILQNRVDSLEFSLESQKQMNSDLQKQCEELVQIKGEIEENLMKAEQMHQSFVAETSQRISKLQEDTSAHQNVVAETLSALENKEKELQLLNDKVETEQAEIQELKKSNHLLEDSLKELQLLSETLSLEKKEMSSIISLNKREIEELTQENGTLKEINASLNQEKMNLIQKSESFANYIDEREKSISELSDQYKQEKLILLQRCEETGNAYEDLSQKYKAAQEKNSKLECLLNECTSLCENRKNELEQLKEAFAKEHQEFLTKLAFAEERNQNLMLELETVQQALRSEMTDNQNNSKSEAGGLKQEIMTLKEEQNKMQKEVNDLLQENEQLMKVMKTKHECQNLESEPIRNSVKERESERNQCNFKPQMDLEVKEISLDSYNAQLVQLEAMLRNKELKLQESEKEKECLQHELQTIRGDLETSNLQDMQSQEISGLKDCEIDAEEKYISGPHELSTSQNDNAHLQCSLQTTMNKLNELEKICEILQAEKYELVTELNDSRSECITATRKMAEEVGKLLNEVKILNDDSGLLHGELVEDIPGGEFGEQPNEQHPVSLAPLDESNSYEHLTLSDKEVQMHFAELQEKFLSLQSEHKILHDQHCQMSSKMSELQTYVDSLKAENLVLSTNLRNFQGDLVKEMQLGLEEGLVPSLSSSCVPDSSSLSSLGDSSFYRALLEQTGDMSLLSNLEGAVSANQCSVDEVFCSSLQTYVDSLKAENLVLSTNLRNFQGDLVKEMQLGLEEGLVPSLSSSCVPDSSSLSSLGDSSFYRALLEQTGDMSLLSNLEGVVSANQCSVDEVFCSSLQEENLTRKETPSAPAKGVEELESLCEVYRQSLEKLEEKMESQGIMKNKEIQELEQLLSSERQELDCLRKQYLSENEQWQQKLTSVTLEMESKLAAEKKQTEQLSLELEVARLQLQGLDLSSRSLLGIDTEDAIQGRNESCDISKEHTSETTERTPKHDVHQICDKDAQQDLNLDIEKITETGAVKPTGECSGEQSPDTNYEPPGEDKTQGSSECISELSFSGPNALVPMDFLGNQEDIHNLQLRVKETSNENLRLLHVIEDRDRKVESLLNEMKELDSKLHLQEVQLMTKIEACIELEKIVGELKKENSDLSEKLEYFSCDHQELLQRVETSEGLNSDLEMHADKSSREDIGDNVAKVNDSWKERFLDVENELSRIRSEKASIEHEALYLEADLEVVQTEKLCLEKDNENKQKVIVCLEEELSVVTSERNQLRGELDTMSKKTTALDQLSEKMKEKTQELESHQSECLHCIQVAEAEVKEKTELLQTLSSDVSELLKDKTHLQEKLQSLEKDSQALSLTKCELENQIAQLNKEKELLVKESESLQARLSESDYEKLNVSKALEAALVEKGEFALRLSSTQEEVHQLRRGIEKLRVRIEADEKKQLHIAEKLKERERENDSLKDKVENLERELQMSEENQELVILDAENSKAEVETLKTQIEEMARSLKVFELDLVTLRSEKENLTKQIQEKQGQLSELDKLLSSFKSLLEEKEQAEIQIKEESKTAVEMLQNQLKELNEAVAALCGDQEIMKATEQSLDPPIEEEHQLRNSIEKLRARLEADEKKQLCVLQQLKESEHHADLLKGRVENLERELEIARTNQEHAALEAENSKGEVETLKAKIEGMTQSLRGLELDVVTIRSEKENLTNELQKEQERISELEIINSSFENILQEKEQEKVQMKEKSSTAMEMLQTQLKELNERVAALHNDQEACKAKEQNLSSQVECLELEKAQLLQGLDEAKNNYIVLQSSVNGLIQEVEDGKQKLEKKDEEISRLKNQIQDQEQLVSKLSQVEGEHQLWKEQNLELRNLTVELEQKIQVLQSKNASLQDTLEVLQSSYKNLENELELTKMDKMSFVEKVNKMTAKETELQREMHEMAQKTAELQEELSGEKNRLAGELQLLLEEIKSSKDQLKELTLENSELKKSLDCMHKDQVEKEGKVREEIAEYQLRLHEAEKKHQALLLDTNKQYEVEIQTYREKLTSKEECLSSQKLEIDLLKSSKEELNNSLKATTQILEELKKTKMDNLKYVNQLKKENERAQGKMKLLIKSCKQLEEEKEILQKELSQLQAAQEKQKTGTVMDTKVDELTTEIKELKETLEEKTKEADEYLDKYCSLLISHEKLEKAKEMLETQVAHLCSQQSKQDSRGSPLLGPVVPGPSPIPSVTEKRLSSGQNKASGKRQRSSGIWENGRGPTPATPESFSKKSKKAVMSGIHPAEDTEGTEFEPEGLPEVVKKGFADIPTGKTSPYILRRTTMATRTSPRLAAQKLALSPLSLGKENLAESSKPTAGGSRSQKVKVAQRSPVDSGTILREPTTKSVPVNNLPERSPTDSPREGLRVKRGRLVPSPKAGLESNGSENCKVQ

SEQ ID NO: 147 - protein, 2032 aa, homo sapiens [sequence omitted]

SEQ ID NO: 148 - protein, 1675 aa, homo sapiens
MAQILPIRFQEHLQLQNLGINPANIGFSTLTMESDKFICIREKVGEQAQVVIIDMNDPSNPIRRPISADSAIMNPASKVIALKAGKTLQIFNIEMKSKMKAHTMTDDVTFWKWISLNTVALVTDNAVYHWSMEGESQPVKMFDRHSSLAGCQIINYRTDAKQKWLLLTGISAQQNRVVGAMQLYSVDRKVSQPIEGHAASFAQFKMEGNAEESTLFCFAVRGQAGGKLHIIEVGTPPTGNQPFPKKAVDVFFPPEAQNDFPVAMQISEKHDVVFLITKYGYIHLYDLETGTCIYMNRISGETIFVTAPHEATAGIIGVNRKGQVLSVCVEEENIIPYITNVLQNPDLALRMAVRNNLAGAEELFARKFNALFAQGNYSEAAKVAANAPKGILRTPDTIRRFQSVPAQPGQTSPLLQYFGILLDQGQLNKYESLELCRPVLQQGRKQLLEKWLKEDKLECSEELGDLVKSVDPTLALSVYLRANVPNKVIQCFAETGQVQKIVLYAKKVGYTPDWIFLLRNVMRISPDQGQQFAQMLVQDEEPLADITQIVDVFMEYNLIQQCTAFLLDALKNNRPSEGPLQTRLLEMNLMHAPQVADAILGNQMFTHYDRAHIAQLCEKAGLLQRALEHFTDLYDIKRAVVHTHLLNPEWLVNYFGSLSVEDSLECLRAMLSANIRQNLQICVQVASKYHEQLSTQSLIELFESFKSFEGLFYFLGSIVNFSQDPDVHFKYIQAACKTGQIKEVERICRESNCYDPERVKNFLKEAKLTDQLPLIIVCDRFDFVHDLVLYLYRNNLQKYIEIYVQKVNPSRLPVVIGGLLDVDCSEDVIKNLILVVRGQFSTDELVAEVEKRNRLKLLLPWLEARIHEGCEEPATHNALAKIYIDSNNNPERFLRENPYYDSRVVGKYCEKRDPHLACVAYERGQCDLELINVCNENSLFKSLSRYLVRRKDPELWGSVLLESNPYRRPLIDQVVQTALSETQDPEEVSVTVKAFMTADLPNELIELLEKIVLDNSVFSEHRNLQNLLILTAIKADRTRVMEYINRLDNYDAPDIANIAISNELFEEAFAIFRKFDVNTSAVQVLIEHIGNLDRAYEFAERCNEPAVWSQLAKAQLQKGMVKEAIDSYIKADDPSSYMEVVQAANTSGNWEELVKYLQMARKKARESYVETELIFALAKTNRLAELEEFINGPNNAHIQQVGDRCYDEKMYDAAKLLYNNVSNFGRLASTLVHLGEYQAAVDGARKANSTRTWKEVCFACVDGKEFRLAQMCGLHIVVHADELEELINYYQDRGYFEELITMLEAALGLERAHMGMFTELAILYSKFKPQKMREHLELFWSRVNIPKVLRAAEQAHLWAELVFLYDKYEEYDNAIITMMNHPTDAWKEGQFKDIITKVANVELYYRAIQFYLEFKPLLLNDLLMVLSPRLDHTRAVNYFSKVKQLPLVKPYLRSVQNHNNKSVNESLNNLFITEEDYQALRTSIDAYDNFDNISLAQRLEKHELIEFRRIAAYLFKGNNRWKQSVELCKKDSLYKDAMQYASESKDTELAEELLQWFLQEEKRECFGACLFTCYDLLRPDVVLETAWRHNIMDFAMPYFIQVMKEYLTKVDKLDASESLRKEEEQATETQPIVYGQPQLMLTAGPSVAVPPQAPFGYGYTAPPYGQPQPGFGYSM

SEQ ID NO: 149 - protein, 1865 aa, homo sapiens
MTRWVPTKREEKYGVAFYNYDARGADELSLQIGDTVHILETYEGWYRGYTLRKKSKKGIFPASYIHLKEAIVEGKGQHETVIPGDLPLIQEVTTTLREWSTIWRQLYVQDNREMFRSVRHMIYDLIEWRSQILSGTLPQDELKELKKKVTAKIDYGNRILDLDLVVRDEDGNILDPELTSTISLFRAHEIASKQVEERLQEEKSQKQNIDINRQAKFAATPSLALFVNLKNVVCKIGEDAEVLMSLYDPVESKFISENYLVRWSSSGLPKDIDRLHNLRAVFTDLGSKDLKREKISFVCQIVRVGRMELRDNNTRKLTSGLRRPFGVAVMDVTDIINGKVDDEDKQHFIPFQPVAGENDFLQTVINKVIAAKEVNHKGQGLWVTLKLLPGDIHQIRKEFPHLVDRTTAVARKTGFPEIIMPGDVRNDIYVTLVQGDFDKGSKTTAKNVEVTVSVYDEDGKRLEHVIFPGAGDEAISEYKSVIYYQVKQPRWFETVKVAIPIEDVNRSHLRFTFRHRSSQDSKDKSEKIFALAFVKLMRYDGTTLRDGEHDLIVYKAEAKKLEDAATYLSLPSTKAELEEKGHSATGKSMQSLGSCTISKDSFQISTLVCSTKLTQNVDLLGLLKWRSNTSLLQQNLRQLMKVDGGEVVKFLQDTLDALFNIMMENSESETFDTLVFDALVFIIGLIADRKFQHFNPVLETYIKKHFSATLAYTKLTKVLKNYVDGAEKPGVNEQLYKAMKALESIFKFIVRSRILFNQLYENKGEADFVESLLQLFRSINDMMSSMSDQTVRVKGAALKYLPTIVNDVKLVFDPKELSKMFTEFILNVPMGLLTIQKLYCLIEIVHSDLFTQHDCREILLPMMTDQLKYHLERQEDLEACCQLLSHILEVLYRKDVGPTQRHVQIIMEKLLRTVNRTVISMGRDSELIGNFVACMTAILRQMEDYHYAHLIKTFGKMRTDVVDFLMETFIMFKNLIGKNVYPFDWVIMNMVQNKVFLRAINQYADMLNKKFLDQANFELQLWNNYFHLAVAFLTQESLQLENFSSAKRAKILNKYGDMRRQIGFEIRDMWYNLGQHKIKFIPEMVGPILEMTLIPETELRKATIPIFFDMMQCEFHSTRSFQMFENEIITKLDHEVEGGRGDEQYKVLFDKILLEHCRKHKYLAKTGETFVKLVVRLMERLLDYRTIMHDENKENRMSCTVNVLNFYKEIEREEMYIRYLYKLCDLHKECDNYTEAAYTLLLHAKLLKWSEDVCVAHLTQRDGYQATTQGQLKEQLYQEIIHYFDKGKMWEEAIALGKELAEQYENEMFDYEQLSELLKKQAQFYENIVKVIRPKPDYFAVGYYGQGFPTFLRGKVFIYRGKEYERREDFEARLLTQFPNAEKMKTTSPPGDDIKNSPGQYIQCFTVKPKLDLPPKFHRPVSEQIVSFYRVNEVQRFEYSRPIRKGEKNPDNEFANMWIERTIYTTAYKLPGILRWFEVKSVFMVEISPLENAIETMQLTNDKINSMVQQHLDDPSLPINPLSMLLNGIVDPAVMGGFANYEKAFFTDRYLQEHPEAHEKIEKLKDLIAWQIPFLAEGIRIHGDKVTEALRPFHERMEACFKQLKEKVEKEYGVRIMPSSLDDRRGSRPRSMVRSFTMPSSSRPLSVASVSSLSSDSTPSRPGSDGFALEPLLPKKMHSRSQDKLDKDDLEKEKKDKKKEKRNSKHQEIFEKEFKPTDISLQQSEAVILSETISPLRPQRPKSQVMNVIGSERRFSVSPSSPSSQQTPPPVTPRAKLSFSMQSSLELNGMTGADVADVPPPLPLKGSVADYGNLMENQDLLGSPTPPPPPPHQRHLPPPLPSKTPPPPPPKTTRKQTSVDSGIVQ

SEQ ID NO: 150 - protein, 1118 aa, homo sapiens
MARSPGRAYALLLLLICFNVGSGLHLQVLSTRNENKLLPKHPHLVRQKRAWITAPVALREGEDLSKKNPIAKIHSDLAEERGLKITYKYTGKGITEPPFGIFVFNKDTGELNVTSILDREETPFFLLTGYALDARGNNVEKPLELRIKVLDINDNEPVFTQDVFVGSVEELSAAHTLVMKINATDADEPNTLNSKISYRIVSLEPAYPPVFYLNKDTGEIYTTSVTLDREEHSSYTLTVEARDGNGEVTDKPVKQAQVQIRILDVNDNIPVVENKVLEGMVEENQVNVEVTRIKVFDADEIGSDNWLANFTFASGNEGGYFHIETDAQTNEGIVTLIKEVDYEEMKNLDFSVIVANKAAFHKSIRSKYKPTPIPIKVKVKNVKEGIHFKSSVISIYVSESMDRSSKGQIIGNFQAFDEDTGLPAHARYVKLEDRDNWISVDSVTSEIKLAKLPDFESRYVQNGTYTVKIVAISEDYPRKTITGTVLINVEDINDNCPTLIEPVQTICHDAEYVNVTAEDLDGHPNSGPFSFSVIDKPPGMAEKWKIARQESTSVLLQQSEKKLGRSEIQFLISDNQGFSCPEKQVLTLTVCECLHGSGCREAQHDSYVGLGPAAIALMILAFLLLLLVPLLLLMCHCGKGAKGFTPIPGTIEMLHPWNNEGAPPEDKVVPSFLPVDQGGSLVGRNGVGGMAKEATMKGSSSASIVKGQHEMSEMDGRWEEHRSLLSGRATQFTGATGAIMTTETTKTARATGASRDMAGAQAAAVALNEEFLRNYFTDKAASYTEEDENHTAKDCLLVYSQEETESLNASIGCCSFIEGELDDRFLDDLGLKFKTLAEVCLGQKIDINKEIEQRQKPATETSMNTASHSLCEQTMVNSENTYSSGSSFPVPKSLQEANAEKVTQEIVTERSVSSRQAQKVATPLPDPMASRNVIATETSYVTGSTMPPTTVILGPSQPQSLIVTERVYAPASTLVDQPYANEGTVVVTERVIQPHGGGSNPLEGTQHLQDVPYVMVRERESFLAPSSGVQPTLAMPNIAVGQNVTVTERVLAPASTLQSSYQIPTENSMTARNTTVSGAGVPGPLPDFGLEESGHSNSTITTSSTRVTKHSTVQHSYS

SEQ ID NO: 151 - protein, 922 aa, homo sapiens
MAEQRFCVDYAKRGTAGCKKCKEKIVKGVCRIGKVVPNPFSESGGDMKEWYHIKCMFEKLERARATTKKIEDLTELEGWEELEDNEKEQITQHIADLSSKAAGTPKKKAVVQAKLTTTGQVTSPVKGASFVTSTNPRKFSGFSAKPNNSGEAPSSPTPKRSLSSSKCDPRHKDCLLREFRKLCAMVADNPSYNTKTQIIQDFLRKGSAGDGFHGDVYLTVKLLLPGVIKTVYNLNDKQIVKLFSRIFNCNPDDMARDLEQGDVSETIRVFFEQSKSFPPAAKSLLTIQEVDEFLLRLSKLTKEDEQQQALQDIASRCTANDLKCIIRLIKHDLKMNSGAKHVLDALDPNAYEAFKASRNLQDVVERVLHNAQEVEKEPGQRRALSVQASLMTPVQPMLAEACKSVEYAMKKCPNGMFSEIKYDGERVQVHKNGDHFSYFSRSLKPVLPHKVAHFKDYIPQAFPGGHSMILDSEVLLIDNKTGKPLPFGTLGVHKKAAFQDANVCLFVFDCIYFNDVSLMDRPLCERRKFLHDNMVEIPNRIMFSEMKRVTKALDLADMITRVIQEGLEGLVLKDVKGTYEPGKRHWLKVKKDYLNEGAMADTADLVVLGAFYGQGSKGGMMSIFLMGCYDPGSQKWCTVTKCAGGHDDATLARLQNELDMVKISKDPSKIPSWLKVNKIYYPDFIVPDPKKAAVWEITGAEFSKSEAHTADGISIRFPRCTRIRDDKDWKSATNLPQLKELYQLSKEKADFTVVAGDEGSSTTGGSSEENKGPSGSAVSRKAPSKPSASTKKAEGKLSNSNSKDGNMQTAKPSAMKVGEKLATKSSPVKVGEKRKAADETLCQTKVLLDIFTGVRLYLPPSTPDFSRLRRYFVAFDGDLVQEFDMTSATHVLGSRDKNPAAQQVSPEWIWACIRKRRLVAPC

SEQ ID NO: 152 - protein, 1137 aa, homo sapiens
MSRRKPASGGLAASSSAPARQAVLSRFFQSTGSLKSTSSSTGAADQVDPGAAAAAAAAAAAAPPAPPAPAFPPQLPPHVATEIDRRKKRPLENDGPVKKKVKKVQQKEGGSDLGMSGNSEPKKCLRTRNVSKSLEKLKEFCCDSALPQSRVQTESLQERFAVLPKCTDFDDISLLHAKNAVSSEDSKRQINQKDTTLFDLSQFGSSNTSHENLQKTASKSANKRSKSIYTPLELQYIEMKQQHKDAVLCVECGYKYRFFGEDAEIAARELNIYCHLDHNFMTASIPTHRLFVHVRRLVAKGYKVGVVKQTETAALKAIGDNRSSLFSRKLTALYTKSTLIGEDVNPLIKLDDAVNVDEIMTDTSTSYLLCISENKENVRDKKKGNIFIGIVGVQPATGEVVFDSFQDSASRSELETRMSSLQPVELLLPSALSEQTEALIHRATSVSVQDDRIRVERMDNIYFEYSHAFQAVTEFYAKDTVDIKGSQIISGIVNLEKPVICSLAAIIKYLKEFNLEKMLSKPENFKQLSSKMEFMTINGTTLRNLEILQNQTDMKTKGSLLWVLDHTKTSFGRRKLKKWVTQPLLKLREINARLDAVSEVLHSESSVFGQIENHLRKLPDIERGLCSIYHKKCSTQEFFLIVKTLYHLKSEFQAIIPAVNSHIQSDLLRTVILEIPELLSPVEHYLKILNEQAAKVGDKTELFKDLSDFPLIKKRKDEIQGVIDEIRMHLQEIRKILKNPSAQYVTVSGQEFMIEIKNSAVSCIPTDWVKVGSTKAVSRFHSPFIVENYRHLNQLREQLVLDCSAEWLDFLEKFSEHYHSLCKAVHHLATVDCIFSLAKVAKQGDYCRPTVQEERKIVIKNGRHPVIDVLLGEQDQYVPNNTDLSEDSERVMIITGPNMGGKSSYIKQVALITIMAQIGSYVPAEEATIGIVDGIFTRMGAADNIYKGRSTFMEELTDTAEIIRKATSQSLVILDELGRGTSTHDGIAIAYATLEYFIRDVKSLTLFVTHYPPVCELEKNYSHQVGNYHMGFLVSEDESKLDPGTAEQVPDFVTFLYQITRGIAARSYGLNVAKLADVPGEILKKAAHKSKELEGLINTKRKRLKYFAKLWTMHNAQDLQKWTEEFNMEETQTSLLH

SEQ ID NO: 153 - protein, 3130 aa, homo sapiens
MFSVRIVTADYYMASPLQGLDTCQSPLTQAPVKKVPVVRVFGATPAGQKTCLHLHGIFPYLYVPYDGYGQQPESYLSQMAFSIDRALNVALGNPSSTAQHVFKVSLVSGMPFYGYHEKERHFMKIYLYNPTMVKRICELLQSGAIMNKFYQPHEAHIPYLLQLFIDYNLYGMNLINLAAVKFRKARRKSNTLHATGSCKNHLSGNSLADTLFRWEQDEIPSSLILEGVEPQSTCELEVDAVAADILNRLDIEAQIGGNPGLQAIWEDEKQRRRNRNETSQMSQPESQDHRFVPATESEKKFQKRLQEILKQNDFSVTLSGSVDYSDGSQEFSAELTLHSEVLSPEMLQCTPANMVEVHKDKESSKGHTRHKVEEALINEEAILNLMENSQTFQPLTQRLSESPVFMDSSPDEALVHLLAGLESDGYRGERNRMPSPCRSFGNNKYPQNSDDEENEPQIEKEEMELSLVMSQRWDSNIEEHCAKKRSLCRNTHRSSTEDDDSSSGEEMEWSDNSLLLASLSIPQLDGTADENSDNPLNNENSRTHSSVIATSKLSVKPSIFHKDAATLEPSSSAKITFQCKHTSALSSHVLNKEDLIEDLSQTNKNTEKGLDNSVTSFTNESTYSMKYPGSLSSTVHSENSHKENSKKEILPVSSCESSIFDYEEDIPSVTRQVPSRKYTNIRKIEKDSPFIHMHRHPNENTLGKNSFNFSDLNHSKNKVSSEGNEKGNSTALSSLFPSSFTENCELLSCSGENRTMVHSLNSTADESGLNKLKIRYEEFQEHKTEKPSLSQQAAHYMFFPSVVLSNCLTRPQKLSPVTYKLQPGNKPSRLKLNKRKLAGHQETSTKSSETGSTKDNFIQNNPCNSNPEKDNALASDLTKTTRGAFENKTPTDGFIDCHFGDGTLETEQSFGLYGNKYTLRAKRKVNYETEDSESSFVTHNSKISLPHPMEIGESLDGTLKSRKRRKMSKKLPPVIIKYIIINRFRGRKNMLVKLGKIDSKEKQVILTEEKMELYKKLAPLKDFWPKVPDSPATKYPIYPLTPKKSHRRKSKHKSAKKKTGKQQRTNNENIKRTLSFRKKRSHAILSPPSPSYNAETEDCDLNYSDVMSKLGFLSERSTSPINSSPPRCWSPTDPRAEEIMAAAEKEAMLFKGPNVYKKTVNSRIGKTSRARAQIKKSKAKLANPSIVTKKRNKRNQTNKLVDDGKKKPRAKQKTNEKGTSRKHTTLKDEKIKSQSGAEVKFVLKHQNVSEFASSSGGSQLLFKQKDMPLMGSAVDHPLSASLPTGINAQQKLSGCFSSFLESKKSVDLQTFPSSRDDLHPSVVCNSIGPGVSKINVQRPHNQSAMFTLKESTLIQKNIFDLSNHLSQVAQNTQISSGMSSKIEDNANNIQRNYLSSIGKLSEYRNSLESKLDQAYTPNFLHCKDSQQQIVCIAEQSKHSETCSPGNTASEESQMPNNCFVTSLRSPIKQIAWEQKQRGFILDMSNFKPERVKPRSLSEAISQTKALSQCKNRNVSTPSAFGEGQSGLAVLKELLQKRQQKAQNANTTQDPLSNKHQPNKNISGSLEHNKANKRTRSVTSPRKPRTPRSTKQKEKIPKLLKVDSLNLQNSSQLDNSVSDDSPIFFSDPGFESCYSLEDSLSPEHNYNFDINTIGQTGFCSFYSGSQFVPADQNLPQKFLSDAVQDLFPGQAIEKNEFLSHDNQKCDEDKHHTTDSASWIRSGTLSPEIFEKSTIDSNENRRHNQWKNSFHPLTTRSNSIMDSFCVQQAEDCLSEKSRLNRSSVSKEVFLSLPQPNNSDWIQGHTRKEMGQSLDSANTSFTAILSSPDGELVDVACEDLELYVSRNNDMLTPTPDSSPRSTSSPSQSKNGSFTPRTANILKPLMSPPSREEIMATLLDHDLSETIYQEPFCSNPSDVPEKPREIGGRLLMVETRLANDLAEFEGDFSLEGLRLWKTAFSAMTQNPRPGSPLRSGQGVVNKGSSNSPKMVEDKKIVIMPCKCAPSRQLVQVWLQAKEEYERSKKLPKTKPTGVVKSAENFSSSVNPDDKPVVPPKMDVSPCILPTTAHTKEDVDNSQIALQAPTTGCSQTASESQMLPPVASASDPEKDEDDDDNYYISYSSPDSPVIPPWQQPISPDSKALNGDDRPSSPVEELPSLAFENFLKPIKDGIQKSPCSEPQEPLVISPINTRARTGKCESLCFHSTPIIQRKLLERLPEAPGLSPLSTEPKTQKLSNKKGSNTDTLRRVLLTQAKNQFAAVNTPQKETSQIDGPSLNNTYGFKVSIQNLQEAKALHEIQNLTLISVELHARTRRDLEPDPEFDPICALFYCISSDTPLPDTEKTELTGVIVIDKDKTVFSQDIRYQTPLLIRSGITGLEVTYAADEKALFHEIANIIKRYDPDILLGYEIQMHSWGYLLQRAAALSIDLCRMISRVPDDKIENRFAAERDEYGSYTMSEINIVGRITLNLWRIMRNEVALTNYTFENVSFHVLHQRFPLFTFRVLSDWFDNKTDLYRWKMVDHYVSRVRGNLQMLEQLDLIGKTSEMARLFGIQFLHVLTRGSQYRVESMMLRIAKPMNYIPVTPSVQQRSQMRAPQCVPLIMEPESRFYSNSVLVLDFQSLYPSIVIAYNYCFSTCLGHVENLGKYDEFKFGCTSLRVPPDLLYQVRHDITVSPNGVAFVKPSVRKGVLPRMLEEILKTRFMVKQSMKAYKQDRALSRMLDARQLGLKLIANVTFGYTSANFSGRMPCIEVGDSIVHKARETLERAIKLVNDTKKWGARVVYGDTDSMFVLLKGATKEQSFKIGQEIAEAVTATNPKPVKLKFEKVYLPCVLQTKKRYVGYMYETLDQKDPVFDAKGIETVRRDSCPAVSKILERSLKLLFETRDISLIKQYVQRQCMKLLEGKASIQDFIFAKEYRGSFSYKPGACVPALELTRKMLTYDRRSEPQVGERVPYVIIYGTPGVPLIQLVRRPVEVLQDPTLRLNATYYITKQILPPLARIFSLIGIDVFSWYHELPRIHKATSSSRSEPEGRKGTISQYFTTLHCPVCDDLTQHGICSKCRSQPQHVAVILNQEIRELERQQEQLVKICKNCTGCFDRHIPCVSLNCPVLFKLSRVNRELSKAPYLRQLLDQF

SEQ ID NO: 154 - protein, 119 aa, homo sapiens
MKALSPVRGCYEAVCCLSERSLAIARGRGKGPAAEEPLSLLDDMNHCYSRLRELVPGVPRGTQLSQVEILQRVIDYILDLQVVLAEPAPGPPDGPHLPIQTAELAPELVISNDKRSFCH

SEQ ID NO: 155 - protein, 631 aa, homo sapiens
MAPPGSSTVFLLALTIIASTWALTPTHYLTKHDVERLKASLDRPFTNLESAFYSIVGLSSLGAQVPDAKKACTYIRSNLDPSNVDSLFYAAQASQALSGCEISISNETKDLLLAAVSEDSSVTQIYHAVAALSGFGLPLASQEALSALTARLSKEETVLATVQALQTASHLSQQADLRSIVEEIEDLVARLDELGGVYLQFEEGLETTALFVAATYKLMDHVGTEPSIKEDQVIQLMNAIFSKKNFESLSEAFSVASAAAVLSHNRYHVPVVVVPEGSASDTHEQAILRLQVTNVLSQPLTQATVKLEHAKSVASRATVLQKTSFTPVGDVFELNFMNVKFSSGYYDFLVEVEGDNRYIANTVELRVKISTEVGITNVDLSTVDKDQSIAPKTTRVTYPAKAKGTFIADSHQNFALFFQLVDVNTGAELTPHQTFVRLHNQKTGQEVVFVAEPDNKNVYKFELDTSERKIEFDSASGTYTLYLIIGDATLKNPILWNVADVVIKFPEEEAPSTVLSQNLFTPKQEIQHLFREPEKRPPTVVSNTFTALILSPLLLLFALWIRIGANVSNFTFAPSTIIFHLGHAAMLGLMYVYWTQLNMFQTLKYLAILGSVTFLAGNRMLAQQAVKRTAH

SEQ ID NO: 156 - protein, 605 aa, homo sapiens
MGRLLRAARLPPLLSPLLLLLVGGAFLGACVAGSDEPGPEGLTSTSLLDLLLPTGLEPLDSEEPSETMGLGAGLGAPGSGFPSEENEESRILQPPQYFWEEEEELNDSSLDLGPTADYVFPDLTEKAGSIEDTSQAQELPNLPSPLPKMNLVEPPWHMPPREEEEEEEEEEEREKEEVEKQEEEEEEELLPVNGSQEEAKPQVRDFSLTSSSQTPGATKSRHEDSGDQASSGVEVESSMGPSLLLPSVTPTTVTPGDQDSTSQEAEATVLPAAGLGVEFEAPQEASEEATAGAAGLSGQHEEVPALPSFPQTTAPSGAEHPDEDPLGSRTSASSPLAPGDMELTPSSATLGQEDLNQQLLEGQAAEAQSRIPWDSTQVICKDWSNLAGKNYIILNMTENIDCEVFRQHRGPQLLALVEEVLPRHGSGHHGAWHISLSKPSEKEQHLLMTLVGEQGVVPTQDVLSMLGDIRRSLEEIGIQNYSTTSSCQARASQVRSDYGTLFVVLVVIGAICIIIIALGLLYNCWQRRLPKLKHVSHGEELRFVENGCHDNPTLDVASDSQSEMQEKHPSLNGGGALNGPGSWGALMGGKRDPEDSDVFEEDTHL

SEQ ID NO: 157 - protein, 340 aa, homo sapiens
MGPPHSGPGGVRVGALLLLGVLGLVSGLSLEPVYWNSANKRFQAEGGYVLYPQIGDRLDLLCPRARPPGPHSSPNYEFYKLYLVGGAQGRRCEAPPAPNLLLTCDRPDLDLRFTIKFQEYSPNLWGHEFRSHHDYYIIATSDGTREGLESLQGGVCLTRGMKVLLRVGQSPRGGAVPRKPVSEMPMERDRGAAHSLEPGKENLPGDPTSNATSRGAEGPLPPPSMPAVAGAAGGLALLLLGVAGAGGAMCWRRRRAKPSESRHPGPGSFGRGGSLGLGGGGGMGPREAEPGELGIALRGGGAADPPFCPHYEKVSGDYGHPVYIVQDGPPQSPPNIYYKV

SEQ ID NO: 158 - protein, 864 aa, homo sapiens
MAAPLIPLSQQIPTGNSLYESYYKQVDPAYTGRVGASEAALFLKKSGLSDIILGKIWDLADPEGKGFLDKQGFYVALRLVACAQSGHEVTLSNLNLSMPPPKFHDTSSPLMVTPPSAEAHWAVRVEEKAKFDGIFESLLPINGLLSGDKVKPVLMNSKLPLDVLGRVWDLSDIDKDGHLDRDEFAVAMHLVYRALEKEPVPSALPPSLIPPSKRKKTVFPGAVPVLPASPPPKDSLRSTPSHGSVSSLNSTGSLSPKHSLKQTQPTVNWVVPVADKMRFDEIFLKTDLDLDGYVSGQEVKEIFMHSGLTQNLLAHIWALADTRQTGKLSKDQFALAMYFIQQKVSKGIDPPQVLSPDMVPPSERGTPGPDSSGSLGSGEFTGVKELDDISQEIAQLQREKYSLEQDIREKEEAIRQKTSEVQELQNDLDRETSSLQELEAQKQDAQDRLDEMDQQKAKLRDMLSDVRQKCQDETQMISSLKTQIQSQESDLKSQEDDLNRAKSELNRLQQEETQLEQSIQAGRVQLETIIKSLKSTQDEINQARSKLSQLHESRQEAHRSLEQYDQVLDGAHGASLTDLANLSEGVSLAERGSFGAMDDPFKNKALLFSNNTQELHPDPFQTEDPFKSDPFKGADPFKGDPFQNDPFAEQQTTSTDPFGGDPFKESDPFRGSATDDFFKKQTKNDPFTSDPFTKNPSLPSKLDPFESSDPFSSSSVSSKGSDPFGTLDPFGSGSFNSAEGFADFSQMSKPPPSGPFTSSLGGAGFSDDPFKSKQDTPALPPKKPAPPRPKPPSGKSTPVSQLGSADFPEAPDPFQPLGADSGDPFQSKKGFGDPFSGKDPFVPSSAAKPSKASASGFADFTSVS

SEQ ID NO: 159 - protein, 2549 aa, homo sapiens
MLGTGPAAATTAATTSSNVSVLQQFASGLKSRNEETRAKAAKELQHYVTMELREMSQEESTRFYDQLNHHIFELVSSSDANERKGGILAIASLIGVEGGNATRIGRFANYLRNLLPSNDPVVMEMASKAIGRLAMAGDTFTAEYVEFEVKRALEWLGADRNEGRRHAAVLVLRELAISVPTFFFQQVQPFFDNIFVAVWDPKQAIREGAVAALRACLILTTQREPKEMQKPQWYRHTFEEAEKGFDETLAKEKGMNRDDRIHGALLILNELVRISSMEGERLREEMEEITQQQLVHDKYCKDLMGFGTKPRHITPFTSFQAVQPQQSNALVGLLGYSSHQGLMGFGTSPSPAKSTLVESRCCRDLMEEKFDQVCQWVLKCRNSKNSLIQMTILNLLPRLAAFRPSAFTDTQYLQDTMNHVLSCVKKEKERTAAFQALGLLSVAVRSEFKVYLPRVLDIIRAALPPKDFAHKRQKAMQVDATVFTCISMLARAMGPGIQQDIKELLEPMLAVGLSPALTAVLYDLSRQIPQLKKDIQDGLLKMLSLVLMHKPLRHPGMPKGLAHQLASPGLTTLPEASDVGSITLALRTLGSFEFEGHSLTQFVRHCADHFLNSEHKEIRMEAARTCSRLLTPSIHLISGHAHVVSQTAVQVVADVLSKLLVVGITDPDPDIRYCVLASLDERFDAHLAQAENLQALFVALNDQVFEIRELAICTVGRLSSMNPAFVMPFLRKMLIQILTELEHSGIGRIKEQSARMLGHLVSNAPRLIRPYMEPILKALILKLKDPDPDPNPGVINNVLATIGELAQVSGLEMRKWVDELFIIIMDMLQDSSLLAKRQVALWTLGQLVASTGYVVEPYRKYPTLLEVLLNFLKTEQNQGTRREAIRVLGLLGALDPYKHKVNIGMIDQSRDASAVSLSESKSSQDSSDYSTSEMLVNMGNLPLDEFYPAVSMVALMRIFRDQSLSHHHTMVVQAITFIFKSLGLKCVQFLPQVMPTFLNVIRVCDGAIREFLFQQLGMLVSFVKSHIRPYMDEIVTLMREFWVMNTSIQSTIILLIEQIVVALGGEFKLYLPQLIPHMLRVFMHDNSPGRIVSIKLLAAIQLFGANLDDYLHLLLPPIVKLFDAPEAPLPSRKAALETVDRLTESLDFTDYASRIIHPIVRTLDQSPELRSTAMDTLSSLVFQLGKKYQIFIPMVNKVLVRHRINHQRYDVLICRIVKGYTLADEEEDPLIYQHRMLRSGQGDALASGPVETGPMKKLHVSTINLQKAWGAARRVSKDDWLEWLRRLSLELLKDSSSPSLRSCWALAQAYNPMARDLFNAAFVSCWSELNEDQQDELIRSIELALTSQDIAEVTQTLLNLAEFMEHSDKGPLPLRDDNGIVLLGERAAKCRAYAKALHYKELEFQKGPTPAILESLISINNKLQQPEAAAGVLEYAMKHFGELEIQATWYEKLHEWEDALVAYDKKMDTNKDDPELMLGRMRCLEALGEWGQLHQQCCEKWTLVNDETQAKMARMAAAAAWGLGQWDSMEEYTCMIPRDTHDGAFYRAVLALHQDLFSLAQQCIDKARDLLDAELTAMAGESYSRAYGAMVSCHMLSELEEVIQYKLVPERREIIRQIWWERLQGCQRIVEDWQKILMVRSLVVSPHEDMRTWLKYASLCGKSGRLALAHKTLVLLLGVDPSRQLDHPLPTVHPQVTYAYMKNMWKSARKIDAFQHMQHFVQTMQQQAQHAIATEDQQHKQELHKLMARCFLKLGEWQLNLQGINESTIPKVLQYYSAATEHDRSWYKAWHAWAVMNFEAVLHYKHQNQARDEKKKLRHASGANITNATTAATTAATATTTASTEGSNSESEAESTENSPTPSPLQKKVTEDLSKTLLMYTVPAVQGFFRSISLSRGNNLQDTLRVLTLWFDYGHWPDVNEALVEGVKAIQIDTWLQVIPQLIARIDTPRPLVGRLIHQLLTDIGRYHPQALIYPLTVASKSTTTARHNAANKILKNMCEHSNTLVQQAMMVSEELIRVAILWHEMWHEGLEEASRLYFGERNVKGMFEVLEPLHAMMERGPQTLKETSFNQAYGRDLMEAQEWCRKYMKSGNVKDLTQAWDLYYHVFRRISKQLPQLTSLELQYVSPKLLMCRDLELAVPGTYDPNQPIIRIQSIAPSLQVITSKQRPRKLTLMGSNGHEFVFLLKGHEDLRQDERVMQLFGLVNTLLANDPTSLRKNLSIQRYAVIPLSTNSGLIGWVPHCDTLHALIRDYREKKKILLNIEHRIMLRMAPDYDHLTLMQKVEVFEHAVNNTAGDDLAKLLWLKSPSSEVWFDRRTNYTRSLAVMSMVGYILGLGDRHPSNLMLDRLSGKILHIDFGDCFEVAMTREKFPEKIPFRLTRMLTNAMEVTGLDGNYRITCHTVMEVLREHKDSVMAVLEAFVYDPLLNWRLMDTNTKGNKRSRTRTDSYSAGQSVEILDGVELGEPAHKKTGTTVPESIHSFIGDGLVKPEALNKKAIQIINRVRDKLTGRDFSHDDTLDVPTQVELLIKQATSHENLCQCYIGWCPFW

SEQ ID NO: 160 - protein, 1269 aa, homo sapiens
MEATGVLPFVRGVDLSGNDFKGGYFPENVKAMTSLRWLKLNRTGLCYLPEELAALQKLEHLSVSHNNLTTLHGELSSLPSLRAIVARANSLKNSGVPDDIFKLDDLSVLDLSHNQLTECPRELENAKNMLVLNLSHNSIDTIPNQLFINLTDLLYLDLSENRLESLPPQMRRLVHLQTLVLNGNPLLHAQLRQLPAMTALQTLHLRSTQRTQSNLPTSLEGLSNLADVDLSCNDLTRVPECLYTLPSLRRLNLSSNQITELSLCIDQWVHVETLNLSRNQLTSLPSAICKLSKLKKLYLNSNKLDFDGLPSGIGKLTNLEEFMAANNNLELVPESLCRCPKLRKLVLNKNHLVTLPEAIHFLTEIEVLDVRENPNLVMPPKPADRAAEWYNIDFSLQNQLRLAGASPATVAAAAAAGSGPKDPMARKMRLRRRKDSAQDDQAKQVLKGMSDVAQEKNKKQEESADARAPSGKVRRWDQGLEKPRLDYSEFFTEDVGQLPGLTIWQIENFVPVLVEEAFHGKFYEADCYIVLKTFLDDSGSLNWEIYYWIGGEATLDKKACSAIHAVNLRNYLGAECRTVREEMGDESEEFLQVFDNDISYIEGGTASGFYTVEDTHYVTRMYRVYGKKNIKLEPVPLKGTSLDPRFVFLLDRGLDIYVWRGAQATLSSTTKARLFAEKINKNERKGKAEITLLVQGQELPEFWEALGGEPSEIKKHVPEDFWPPQPKLYKVGLGLGYLELPQINYKLSVEHKQRPKVELMPRMRLLQSLLDTRCVYILDCWSDVFIWLGRKSPRLVRAAALKLGQELCGMLHRPRHATVSRSLEGTEAQVFKAKFKNWDDVLTVDYTRNAEAVLQSPGLSGKVKRDAEKKDQMKADLTALFLPRQPPMSLAEAEQLMEEWNEDLDGMEGFVLEGKKFARLPEEEFGHFYTQDCYVFLCRYWVPVEYEEEEKKEDKEEKAEGKEGEEATAEAEEKQPEEDFQCIVYFWQGREASNMGWLTFTFSLQKKFESLFPGKLEVVRMTQQQENPKFLSHFKRKFIIHRGKRKAVQGAQQPSLYQIRTNGSALCTRCIQINTDSSLLNSEFCFILKVPFESEDNQGIVYAWVGRASDPDEAKLAEDILNTMFDTSYSKQVINEGEEPENFFWVGIGAQKPYDDDAEYMKHTRLFRCSNEKGYFAVTEKCSDFCQDDLADDDIMLLDNGQEVYMWVGTQTSQVEIKLSLKACQVYIQHMRSKEHERPRRLRLVRKGNEQHAFTRCFHAWSAFCKALA

SEQ ID NO: 161 - protein, 512 aa, homo sapiens
MAESGLAMWPSLLLLLLLPGPPPVAGLEDAAFPHLGESLQPLLRACPLRCSCPRVDTVDCDGLDLRVFPDNITRAAQHLSLQNNQLQELPYNELSRLSGLRTLNLHNNLISSEGLPDEAFESLTQLQHLCVAHNKLSVAPQFLPRSLRVADLAANQVMEIFPLTFGEKPALRSVYLHNNQLSNAGLPPDAFRGSEAIATLSLSNNQLSYLPPSLPPSLERLHLQNNLISKVPRGALSRQTQLRELYLQHNQLTDSGLDATTFSKLHSLEYLDLSHNQLTTVPAGLPRTLAILHLGRNRIRQVEAARLHGARGLRYLLLQHNQLGSSGLPAGALRPLRGLHTLHLYGNGLDRVPPALPRRLRALVLPHNHVAALGARDLVATPGLTELNLAYNRLASARVHHRAFRRLRALRSLDLAGNQLTRLPMGLPTGLRTLQLQRNQLRMLEPEPLAGLDQLRELSLAHNRLRVGDIGPGTWHELQALQVRHRLVSHTVPRAPPSPCLPCHVPNILVSW

SEQ ID NO: 162 - protein, 398 aa, homo sapiens
MALLRRPTVSSDLENIDTGVNSKVKSHVTIRRTVLEEIGNRVTTRAAQVAKKAQNTKVPVQPTKTTNVNKQLKPTASVKPVQMEKLAPKGPSPTPEDVSMKEENLCQAFSDALLCKIEDIDNEDWENPQLCSDYVKDIYQYLRQLEVLQSINPHFLDGRDINGRMRAILVDWLVQVHSKFRLLQETLYMCVGIMDRFLQVQPVSRKKLQLVGITALLLASKYEEMFSPNIEDFVYITDNAYTSSQIREMETLILKELKFELGRPLPLHFLRRASKAGEVDVEQHTLAKYLMELTLIDYDMVHYHPSKVAAAASCLSQKVLGQGKWNLKQQYYTGYTENEVLEVMQHMAKNVVKVNENLTKFIAIKNKYASSKLLKISMIPQLNSKAVKDLASPLIGRS

SEQ ID NO: 163 - protein, 374 aa, homo sapiens
MSVPAFIDISEEDQAAELRAYLKSKGAEISEENSEGGLHVDLAQIIEACDVCLKEDDKDVESVVNSVVSLLLILEPDKQEALIESLCEKLVKFREGERPSLRLQLLSNLFHGMDKNTPVRYTVYCSLIEVVASCGAIQYIPTELDQVRKWISDWNLTTEKKHTLLRLLYEALADCKKSDAASKVMVELLGSYTEDNASQARVDAHRCIVEPLKDPNAFLFDHLLTLKPVKFLEGELIHDLLTIFVSAKLASYVKFYQNNKDFIDSLGLLHEQNMAKMRLLTFMGMAIENKEISFDTMQQELQIGADDVEAFVIDAVRTKMVYCKIDQTQRKVVVSHSTHRTFGKQRWQQLYDTLNAWKQNLNKVKNSLLSLSDT

SEQ ID NO: 164 - protein, 434 aa, homo sapiens
MSIEKIWAREILDSRGNPTVEVDLYTAKGLFRAAVPSGASTGIYEALELRDGDKQRYLGKGVLKAVDHINSTIAPALISSGLSVVEQEKLDNLMLELDGTENKSKFGANAILGVSLAVCKAGAAERELPLYRHIAQLAGNSDLILPVPAFNVINGGSHAGNKLAMQEFMILPVGAESFRDAMRLGAEVYHTLKGVIKDKYGKDATNVGDEGGFAPNILENSEALELVKEAIDKAGYTEKIVIGMDVAASEFYRDGKYDLDFKSPTDPSRYITGDQLGALYQDFVRDYPVVSIEDPFDQDDWAAWSKFTANVGIQIVGDDLTVTNPKRIERAVEEKACNCLLLKVNQIGSVTEAIQACKLAQENGWGVMVSHRSGETEDTFIADLVVGLCTGQIKTGAPCRSERLAKYNQLMRIEEELGDEARFAGHNFRNPSVL

SEQ ID NO: 165 - protein, 1314 aa, homo sapiens
MALRPGAGSGGGGAAGAGAGSAGGGGFMFPVAGGIRPPQAGLMPMQQQGFPMVSVMQPNMQGIMGMNYSSQMSQGPIAMQAGIPMGPMPAAGMPYLGQAPFLGMRPPGPQYTPDMQKQFAEEQQKRFEQQQKLLEEERKRRQFEEQKQKLRLLSSVKPKTGEKSRDDALEAIKGNLDGFSRDAKMHPTPASHPKKPGPSLEEKFLVSCDISTSGQEQIKLNTSEVGHKALGPGSSKKYPSLMASNGVAVDGCVSGTTTAEAENTSDQNLSIEESGVGVFPSQDPAQPRMPPWIYNESLVPDAYKKILETTMTPTGIDTAKLYPILMSSGLPRETLGQIWALANRTTPGKLTKEELYTVLAMIAVTQRGVPAMSPDALNQFPAAPIPTLSGFSMTLPTPVSQPTVIPSGPAGSMPLSLGQPVMGINLVGPVGGAAAQASSGFIPTYPANQVVKPEEDDFQDFQDASKSGSLDDSFSDFQELPASSKTSNSQHGNSAPSLLMPLPGTKALPSMDKYAVFKGIAADKSSENTVPPGDPGDKYSAFRELEQTAENKPLGESFAEFRSAGTDDGFTDFKTADSVSPLEPPTKDKTFPPSFPSGTIQQKQQTQVKNPLNLADLDMFSSVNCSSEKPLSFSAVFSTSKSVSTPQSTGSAATMTALAATKTSSLADDFGEFSLFGEYSGLAPVGEQDDFADFMAFSNSSISSEQKPDDKYDALKEEASPVPLTSNVGSTVKGGQNSTAASTKYDVFRQLSLEGSGLGVEDLKDNTPSGKSDDDFADFHSSKFSSINSDKSLGEKAVAFRHTKEDSASVKSLDLPSIGGSSVGKEDSEDALSVQFDMKLADVGGDLKHVMSDSSLDLPTVSGQHPPAADIEDLKYAAFGSYSSNFAVSTLTSYDWSDRDDATQGRKLSPFVLSAGSGSPSATSILQKKETSFGSSENITMTSLSKVTTFVSEDALPETTFPALASFKDTIPQTSEQKEYENRDYKDFTKQDLPTAERSQEATCPSPASSGASQETPNECSDDFGEFQSEKPKISKFDFLVATSQSKMKSSEEMIKSELATFDLSVQGSHKRSLSLGDKEISRSSPSPALEQPFRDRSNTLNEKPALPVIRDKYKDLTGEVEENERYAYEWQRCLGSALNVIKKANDTLNGISSSSVCTEVIQSAQGMEYLLGVVEVYRVTKRVELGIKATAVCSEKLQQLLKDIDKVWNNLIGFMSLATLTPDENSLDFSSCMLRPGIKNAQELACGVCLLNVDSRSRKEEKPAEEHPKKAFNSETDSFKLAYGGHQYHASCANFWINCVEPKPPGLVLPDLL

SEQ ID NO: 166 - protein, 214 aa, homo sapiens [sequence omitted]

SEQ ID NO: 167 - protein, 3259 aa, homo sapiens
MLSRLSGLANVVLHELSGDDDTDQNMRAPLDPELHQESDMEFNNTTQEDVQERLAYAEQLVVELKDIIRQKDVQLQQKDEALQEERKAADNKIKKLKLHAKAKLTSLNKYIEEMKAQGGTVLPTEPQSEEQLSKHDKSSTEEEMEIEKIKHKLQEKEELISTLQAQLTQAQAEQPAQSSTEMEEFVMMKQQLQEKEEFISTLQAQLSQTQAEQAAQQVVREKDARFETQVRLHEDELLQLVTQADVETEMQQKLRVLQRKLEEHEESLVGRAQVVDLLQQELTAAEQRNQILSQQLQQMEAEHNTLRNTVETEREESKILLEKMELEVAERKLSFHNLQEEMHHLLEQFEQAGQAQAELESRYSALEQKHKAEMEEKTSHILSLQKTGQELQSACDALKDQNSKLLQDKNEQAVQSAQTIQQLEDQLQQKSKEISQFLNRLPLQQHETASQTSFPDVYNEGTQAVTEENIASLQKRVVELENEKGALLLSSIELEELKAENEKLSSQITLLEAQNRTGEADREVSEISIVDIANKRSSSAEESGQDVLENTFSQKHKELSVLLLEMKEAQEEIAFLKLQLQGKRAEEADHEVLDQKEMKQMEGEGIAPIKMKVFLEDTGQDFPLMPNEESSLPAVEKEQASTEHQSRTSEEISLNDAGVELKSTKQDGDKSLSAVPDIGQCHQDELERLKSQILELELNFHKAQEIYEKNLDEKAKEISNLNQLIEEFKKNADNNSSAFTALSEERDQLLSQVKELSMVTELRAQVKQLEMNLAEAERQRRLDYESQTAHDNLLTEQIHSLSIEAKSKDVKIEVLQNELDDVQLQFSEQSTLIRSLQSQLQNKESEVLEGAERVRHISSKVEELSQALSQKELEITKMDQLLLEKKRDVETLQQTIEEKDQQVTEISFSMTEKMVQLNEEKFSLGVEIKTLKEQLNLLSRAEEAKKEQVEEDNEVSSGLKQNYDEMSPAGQISKEELQHEFDLLKKENEQRKRKLQAALINRKELLQRVSRLEEELANLKDESKKEIPLSETERGEVEEDKENKEYSEKCVTSKCQEIEIYLKQTISEKEVELQHIRKDLEEKLAAEEQFQALVKQMNQTLQDKTNQIDLLQAEISENQAIIQKLITSNTDASDGDSVALVKETVVISPPCTGSSEHWKPELEEKILALEKEKEQLQKKLQEALTSRKAILKKAQEKERHLREELKQQKDDYNRLQEQFDEQSKENENIGDQLRQLQIQVRESIDGKLPSTDQQESCSSTPGLEEPLFKATEQHHTQPVLESNLCPDWPSHSEDASALQGGTSVAQIKAQLKEIEAEKVELELKVSSTTSELTKKSEEVFQLQEQINKQGLEIESLKTVSHEAEVHAESLQQKLESSQLQIAGLEHLRELQPKLDELQKLISKKEEDVSYLSGQLSEKEAALTKIQTEIIEQEDLIKALHTQLEMQAKEHDERIKQLQVELCEMKQKPEEIGEESRAKQQIQRKLQAALISRKEALKENKSLQEELSLARGTIERLTKSLADVESQVSAQNKEKDTVLGRLALLQEERDKLITEMDRSLLENQSLSSSCESLKLALEGLTEDKEKLVKEIESLKSSKIAESTEWQEKHKELQKEYEILLQSYENVSNEAERIQHVVEAVRQEKQELYGKLRSTEANKKETEKQLQEAEQEMEEMKEKMRKFAKSKQQKILELEEENDRLRAEVHPAGDTAKECMETLLSSNASMKEELERVKMEYETLSKKFQSLMSEKDSLSEEVQDLKHQIEGNVSKQANLEATEKHDNQTNVTEEGTQSIPGETEEQDSLSMSTRPTCSESVPSAKSANPAVSKDFSSHDEINNYLQQIDQLKERIAGLEEEKQKNKEFSQTLENEKNTLLSQISTKDGELKMLQEEVTKMNLLNQQIQEELSRVTKLKETAEEEKDDLEERLMNQLAELNGSIGNYCQDVTDAQIKNELLESEMKNLKKCVSELEEEKQQLVKEKTKVESEIRKEYLEKIQGAQKEPGNKSHAKELQELLKEKQQEVKQLQKDCIRYQEKISALERTVKALEFVQTESQKDLEITKENLAQAVEHRKKAQAELASFKVLLDDTQSEAARVLADNLKLKKELQSNKESVKSQMKQKDEDLERRLEQAEEKHLKEKKNMQEKLDALRREKVHLEETIGEIQVTLNKKDKEVQQLQENLDSTVTQLAAFTKSMSSLQDDRDRVIDEAKKWERKFSDAIQSKEEEIRLKEDNCSVLKDQLRQMSIHMEELKINISRLEHDKQIWESKAQTEVQLQQKVCDTLQGENKELLSQLEETRHLYHSSQNELAKLESELKSLKDQLTDLSNSLEKCKEQKGNLEGIIRQQEADIQNSKFSYEQLETDLQASRELTSRLHEEINMKEQKIISLLSGKEEAIQVAIAELRQQHDKEIKELENLLSQEEEENIVLEEENKKAVDKTNQLMETLKTIKKENIQQKAQLDSFVKSMSSLQNDRDRIVGDYQQLEERHLSIILEKDQLIQEAAAENNKLKEEIRGLRSHMDDLNSENAKLDAELIQYREDLNQVITIKDSQQKQLLEVQLQQNKELENKYAKLEEKLKESEEANEDLRRSFNALQEEKQDLSKEIESLKVSISQLTRQVTALQEEGTLGLYHAQLKVKEEEVHRLSALFSSSQKRIAELEEELVCVQKEAAKKVGEIEDKLKKELKHLHHDAGIMRNETETAEERVAELARDLVEMEQKLLMVTKENKGLTAQIQSFGRSMSSLQNSRDHANEELDELKRKYDASLKELAQLKEQGLLNRERDALLSETAFSMNSTEENSLSHLEKLNQQLLSKDEQLLHLSSQLEDSYNQVQSFSKAMASLQNERDHLWNELEKFRKSEEGKQRSAAQPSTSPAEVQSLKKAMSSLQNDRDRLLKELKNLQQQYLQINQEITELHPLKAQLQEYQDKTKAFQIMQEELRQENLSWQHELHQLRMEKSSWEIHERRMKEQYLMAISDKDQQLSHLQNLIRELRSSSSQTQPLKVQYQRQASPETSASPDGSQNLVYETELLRTQLNDSLKEIHQKELRIQQLNSNFSQLLEEKNTLSIQLCDTSQSLRENQQHYGDLLNHCAVLEKQVQELQAGPLNIDVAPGAPQEKNGVHRKSDPEELREPQQSFSEAQQQLCNTRQEVNELRKLLEEERDQRVAAENALSVAEEQIRRLEHSEWDSSRTPIIGSCGTQEQALLIDLTSNSCRRTRSGVGWKRVLRSLCHSRTRVPLLAAIYFLMIHVLLILCFTGHL

SEQ ID NO: 168 - protein, 649 aa, homo sapiens
MKQILGVIDKKLRNLEKKKGKLDDYQERMNKGERLNQDQLDAVSKYQEVTNNLEFAKELQRSFMALSQDIQKTIKKTARREQLMREEAEQKRLKTVLELQYVLDKLGDDEVRTDLKQGLNGVPILSEEELSLLDEFYKLVDPERDMSLRLNEQYEHASIHLWDLLEGKEKPVCGTTYKVLKEIVERVFQSNYFDSTHNHQNGLCEEEEADSAPAVEDQVPEAEPEPAEEYTEQSEVESTEYVNRQFMAETQFTSGEKEQVDEWTVETVEVVNSLQQQPQAASPSVPEPHSLTPVAQADPLVRRQRVQDLMAQMQGPDNFIQDSMLDFENQTLDPAIVSAQPMNPTQNMDMPQLVCPPVHSESRLAQPNQVPVQPEATQVPLVSSTSEGYTASQPLYQPSHATEQRPQKEPIDQIQATISLNTDQTTASSSLPAASQPQVFQAGTSKPLHSSGINVNAAPFQSMQTVFNMNAPVPPVNEPETLKQQNQYQASYNQSFSSQPHQVEQTELQQEQLQTVVGTYHGSPDQSHQVTGNHQQPPQQNTGFPRSNQPYYNSRGVSRGGSRGARGLMNGYRGPAMDSEEDMMVTALHSLTLQTVVIHSLSSVLPGITLAINGMDISRISSEALGRVDHGEPHEVVEGPQDPTEGCRK

SEQ ID NO: 169 - protein, 1017 aa, homo sapiens
MKLLKPTWVNHNGKPIFSVDIHPDGTKFATGGQGQDSGKVVIWNMSPVLQEDDEKDENIPKMLCQMDNHLACVNCVRWSNSGMYLASGGDDKLIMVWKRATYIGPSTVFGSSGKLANVEQWRCVSILRNHSGDVMDVAWSPHDAWLASCSVDNTVVIWNAVKFPEILATLRGHSGLVKGLTWDPVGKYIASQADDRSLKVWRTLDWQLETSITKPFDECGGTTHVLRLSWSPDGHYLVSAHAMNNSGPTAQIIEREGWKTNMDFVGHRKAVTVVKFNPKIFKKKQKNGSSAKPSCPYCCCAVGSKDRSLSVWLTCLKRPLVVIHELFDKSIMDISWTLNGLGILVCSMDGSVAFLDFSQDELGDPLSEEEKSRIHQSTYGKSLAIMTEAQLSTAVIENPEMLKYQRRQQQQQLDQKSAATREMGSATSVAGVVNGESLEDIRKNLLKKQVETRTADGRRRITPLCIAQLDTGDFSTAFFNSIPLSGSLAGTMLSSHSSPQLLPLDSSTPNSFGASKPCTEPVVAASARPAGDSVNKDSMNATSTPAALSPSVLTTPSKIEPMKAFDSRFTERSKATPGAPALTSMTPTAVERLKEQNLVKELRPRDLLESSSDSDEKVPLAKASSLSKRKLELEVETVEKKKKGRPRKDSRLMPVSLSVQSPAALTAEKEAMCLSAPALALKLPIPSPQRAFTLQVSSDPSMYIEVENEVTVVGGVKLSRLKCNREGKEWETVLTSRILTAAGSCDVVCVACEKRMLSVFSTCGRRLLSPILLPSPISTLHCTGSYVMALTAAATLSVWDVHRQVVVVKEESLHSILAGSDMTVSQILLTQHGIPVMNLSDGKAYCFNPSLSTWNLVSDKQDSLAQCADFRSSLPSQDAMLCSGPLAIIQGRTSNSGRQAARLFSVPHVVQQETTLAYLENQVAAALTLQSSHEYRHWLLVYARYLVNEGFEYRLREICKDLLGPVHYSTGSQWESTVVGLRKRELLKELLPVIGQNLRFQRLFTECQEQLDILRDK

SEQ ID NO: 170 - protein, 1210 aa, homo sapiens
MASQLQVFSPPSVSSSAFCSAKKLKIEPSGWDVSGQSSNDKYYTHSKTLPATQGQANSSHQVANFNIPAYDQGLLLPAPAVEHIVVTAADSSGSAATSTFQSSQTLTHRSNVSLLEPYQKCGLKRKSEEVDSNGSVQIIEEHPPLMLQNRTVVGAAATTTTVTTKSSSSSGEGDYQLVQHEILCSMTNSYEVLEFLGRGTFGQVAKCWKRSTKEIVAIKILKNHPSYARQGQIEVSILSRLSSENADEYNFVRSYECFQHKNHTCLVFEMLEQNLYDFLKQNKFSPLPLKYIRPILQQVATALMKLKSLGLIHADLKPENIMLVDPVRQPYRVKVIDFGSASHVSKAVCSTYLQSRYYRAPEIILGLPFCEAIDMWSLGCVIAELFLGWPLYPGASEYDQIRYISQTQGLPAEYLLSAGTKTTRFFNRDPNLGYPLWRLKTPEEHELETGIKSKEARKYIFNCLDDMAQVNMSTDLEGTDMLAEKADRREYIDLLKKMLTIDADKRITPLKTLNHQFVTMTHLLDFPHSNHVKSCFQNMEICKRRVHMYDTVSQIKSPFTTHVAPNTSTNLTMSFSNQLNTVHNQASVLASSSTAAAATLSLANSDVSLLNYQSALYPSSAAPVPGVAQQGVSLQPGTTQICTQTDPFQQTFIVCPPAFQTGLQATTKHSGFPVRMDNAVPIVPQAPAAQPLQIQSGVLTQGSCTPLMVATLHPQVATITPQYAVPFTLSCAAGRPALVEQTAAVLQAWPGGTQQILLPSTWQQLPGVALHNSVQPTAMIPEAMGSGQQLADWRNAHSHGNQYSTIMQQPSLLTNHVTLATAQPLNVGVAHVVRQQQSSSLPSKKNKQSAPVSSKSSLDVLPSQVYSLVGSSPLRTTSSYNSLVPVQDQHQPIIIPDTPSPPVSVITIRSDTDEEEDNKYKPSSSGLKPRSNVISYVTVNDSPDSDSSLSSPYSTDTLSALRGNSGSVLEGPGRVVADGTGTRTIIVPPLKTQLGDCTVATQASGLLSNKTKPVASVSGQSSGCCITPTGYRAQRGGTSAAQPLNLSQNQQSSAAPTSQERSSNPAPRRQQAFVAPLSQAPYTFQHGSPLHSTGHPHLAPAPAHLPSQAHLYTYAAPTSAAALGSTSSIAHLFSPQGSSRHAAAYTTHPSTLVHQVPVSVGPSLLTSASVAPAQYQHQFATQSYIGSSRGSTIYTGYPLSPTKISQYSYL

SEQ ID NO: 171 - protein, 1068 aa, homo sapiens
MNSIKNVPARVLSRRPGHSLEAEREQFDKTQAISISKAINTQEAPVKEKHARRIILGTHHEKGAFTFWSYAIGLPLPSSSILSWKFCHVLHKVLRDGHPNVLHDCQRYRSNIREIGDLWGHLHDRYGQLVNVYTKLLLTKISFHLKHPQFPAGLEVTDEVLEKAAGTDVNNIFQLTVEMFDYMDCELKLSESVFRQLNTAIAVSQMSSGQCRLAPLIQVIQDCSHLYHYTVKLLFKLHSCLPADTLQGHRDRFHEQFHSLRNFFRRASDMLYFKRLIQIPRLPEGPPNFLRASALAEHIKPVVVIPEEAPEDEEPENLIEISTGPPAGEPVVVADLFDQTFGPPNGSVKDDRDLQIESLKREVEMLRSELEKIKLEAQRYIAQLKSQVNALEGELEEQRKQKQKALVDNEQLRHELAQLRAAQLEGERSQGLREEAERKASATEARYNKLKEKHSELVHVHAELLRKNADTAKQLTVTQQSQEEVARVKEQLAFQVEQVKRESELKLEEKSDQLEKLKRELEAKAGELARAQEALSHTEQSKSELSSRLDTLSAEKDALSGAVRQREADLLAAQSLVRETEAALSREQQRSSQEQGELQGRLAERESQEQGLRQRLLDEQFAVLRGAAAEAAGILQDAVSKLDDPLHLRCTSSPDYLVSRAQEALDAVSTLEEGHAQYLTSLADASALVAALTRFSHLAADTIINGGATSHLAPTDPADRLIDTCRECGARALELMGQLQDQQALRHMQASLVRTPLQGILQLGQELKPKSLDVRQEELGAVVDKEMAATSAAIEDAVRRIEDMMNQARHASSGVKLEVNERILNSCTDLMKAIRLLVTTSTSLQKEIVESGRGAATQQEFYAKNSRWTEGLISASKAVGWGATQLVEAADKVVLHTGKYEELIVCSHEIAASTAQLVAASKVKANKHSPHLSRLQECSRTVNERAANVVASTKSGQEQIEDRDTMDFSGLSLIKLKKQEMETQVRVLELEKTLEAERMRLGELRKQHYVLAGASGSPGEEVAIRPSTAPRSVTTKKPPLAQKPSVAPRQDHQLDKKDGIYPAQLVNY

SEQ ID NO: 172 - protein, 1130 aa, homo sapiens
MAAAGQLCLLYLSAGLLSRLGAAFNLDTREDNVIRKYGDPGSLFGFSLAMHWQLQPEDKRLLLVGAPRGEALPLQRANRTGGLYSCDITARGPCTRIEFDNDADPTSESKEDQWMGVTVQSQGPGGKVVTCAHRYEKRQHVNTKQESRDIFGRCYVLSQNLRIEDDMDGGDWSFCDGRLRGHEKFGSCQQGVAATFTKDFHYIVFGAPGTYNWKGIVRVEQKNNTFFDMNIFEDGPYEVGGETEHDESLVPVPANSYLGLLFLTSVSYTDPDQFVYKTRPPREQPDTFPDVMMNSYLGFSLDSGKGIVSKDEITFVSGAPRANHSGAVVLLKRDMKSAHLLPEHIFDGEGLASSFGYDVAVVDLNKDGWQDIVIGAPQYFDRDGEVGGAVYVYMNQQGRWNNVKPIRLNGTKDSMFGIAVKNIGDINQDGYPDIAVGAPYDDLGKVFIYHGSANGINTKPTQVLKGISPYFGYSIAGNMDLDRNSYPDVAVGSLSDSVTIFRSRPVINIQKTITVTPNRIDLRQKTACGAPSGICLQVKSCFEYTANPAGYNPSISIVGTLEAEKERRKSGLSSRVQFRNQGSEPKYTQELTLKRQKQKVCMEETLWLQDNIRDKLRPIPITASVEIQEPSSRRRVNSLPEVLPILNSDEPKTAHIDVHFLKEGCGDDNVCNSNLKLEYKFCTREGNQDKFSYLPIQKGVPELVLKDQKDIALEITVTNSPSNPRNPTKDGDDAHEAKLIATFPDTLTYSAYRELRAFPEKQLSCVANQNGSQADCELGNPFKRNSNVTFYLVLSTTEVTFDTPDLDINLKLETTSNQDNLAPITAKAKVVIELLLSVSGVAKPSQVYFGGTVVGEQAMKSEDEVGSLIEYEFRVINLGKPLTNLGTATLNIQWPKEISNGKWLLYLVKVESKGLEKVTCEPQKEINSLNLTESHNSRKKREITEKQIDDNRKFSLFAERKYQTLNCSVNVNCVNIRCPLRGLDSKASLILRSRLWNSTFLEEYSKLNYLDILMRAFIDVTAAAENIRLPNAGTQVRVTVFPSKTVAQYSGVPWWIILVAILAGILMLALLVFILWKCGFFKRSRYDDSVPRYHAVRIRKEEREIKDEKYIDNLEKKQWITKWNRNESYS

SEQ ID NO: 173 - protein, 625 aa, homo sapiens
MACYIYQLPSWVLDDLCRNMDALSEWDWMEFASYVITDLTQLRKIKSMERVQGVSITRELLWWWGMRQATVQQLVDLLCRLELYRAAQIILNWKPAPEIRCPIPAFPDSVKPEKPLAASVRKAEDEQEEGQPVRMATFPGPGSSPARAHQPAFLQPPEEDAPHSLRSDLPTSSDSKDFSTSIPKQEKLLSLAGDSLFWSEADVVQATDDFNQNRKISQGTFADVYRGHRHGKPFVFKKLRETACSSPGSIERFFQAELQICLRCCHPNVLPVLGFCAARQFHSFIYPYMANGSLQDRLQGQGGSDPLPWPQRVSICSGLLCAVEYLHGLEIIHSNVKSSNVLLDQNLTPKLAHPMAHLCPVNKRSKYTMMKTHLLRTSAAYLPEDFIRVGQLTKRVDIFSCGIVLAEVLTGIPAMDNNRSPVYLKDLLLSDIPSSTASLCSRKTGVENVMAKEICQKYLEKGAGRLPEDCAEALATAACLCLRRRNTSLQEVCGSVAAVEERLRGRETLLPWSGLSEGTGSSSNTPEETDDVDNSSLDASSSMSVAPWAGAATPLLPTENGEGRLRVIVGREADSSSEACVGLEPPQDVTETSWQIEINEAKRKLMENILLYKEEKVDSIELFGP

SEQ ID NO: 174 - protein, 420 aa, homo sapiens
MIIVAHVLLILLGATEILQADLLPDEKISLLPPVNFTIKVTGLAQVLLQWKPNPDQEQRNVNLEYQVKINAPKEDDYETRITESKCVTILHKGFSASVRTILQNDHSLLASSWASAELHAPPGSPGTSIVNLTCTTNTTEDNYSRLRSYQVSLHCTWLVGTDAPEDTQYFLYYRYGSWTEECQEYSKDTLGRNIACWFPRTFILSKGRDWLAVLVNGSSKHSAIRPFDQLFALHAIDQINPPLNVTAEIEGTRLSIQWEKPVSAFPIHCFDYEVKIHNTRNGYLQIEKLMTNAFISIIDDLSKYDVQVRAAVSSMCREAGLWSEWSQPIYVGNDEHKPLREWFVIVIMATICFILLILSLICKICHLWIKLFPPIPAPKSNIKDLFVTTNYEKAGSSETEIEVICYIEKPGVETLEDSVF

SEQ ID NO: 175 - protein, 918 aa, homo sapiens [sequence omitted]

SEQ ID NO: 176 - protein, 1065 aa, homo sapiens
MNKSENLLFAGSSLASQVHAAAVNGDKGALQRLIVGNSALKDKEDQFGRTPLMYCVLADRLDCADALLKAGADVNKTDHSQRTALHLAAQKGNYRFMKLLLTRRANWMQKDLEEMTPLHLTTRHRSPKCLALLLKFMAPGEVDTQDKNKQTALHWSAYYNNPEHVKLLIKHDSNIGIPDVEGKIPLHWAANHKDPSAVHTVRCILDAAPTESLLNWQDYEGRTPLHFAVADGNVTVVDVLTSYESCNITSYDNLFRTPLHWAALLGHAQIVHLLLERNKSGTIPSDSQGATPLHYAAQSNFAETVKVFLKHPSVKDDSDLEGRTSFMWAAGKGSDDVLRTMLSLKSDIDINMADKYGGTALHAAALSGHVSTVKLLLENNAQVDATDVMKHTPLFRACEMGHKDVIQTLIKGGARVDLVDQDGHSLLHWAALGGNADVCQILIENKINPNVQDYAGRTPLQCAAYGGYINCMAVLMENNADPNIQDKEGRTALHWSCNNGYLDAIKLLLDFAAFPNQMENNEERYTPLDYALLGERHEVIQFMLEHGALSIAAIQDIAAFKIQAVYKGYKVRKAFRDRKNLLMKHEQLRKDAAAKKREEENKRKEAEQQKGRRSPDSCRPQALPCLPSTQDVPSRQSRAPSKQPPAGNVAQGPEPRDSRGSPGGSLGGALQKEQHVSSDLQGTNSRRPNETAREHSKGQSACVHFRPNEGSDGSRHPGVPSVEKSRGETAGDERCAKGKGFVKQPSCIRVAGPDEKGEDSRRAAASLPPHDSHWKPSRRHDTEPKAKCAPQKRRTQELRGGRCSPAGSSRPGSARGEAVHAGQNPPHHRTPRNKVTQAKLTGGLYSHLPQSTEELRSGARRLETSTLSEDFQVSKETDPAPGPLSGQSVNIDLLPVELRLQIIQRERRRKELFRKKNKAAAVIQRAWRSYQLRKHLSHLRHMKQLGAGDVDRWRQESTALLLQVWRKELELKFPQTTAVSKAPKSPSKGTSGTKSTKHSVLKQIYGCSHEGKIHHPTRSVKASSVLRLNSVSNLQCIHLLENSGRSKNFSYNLQSATQPKNKTKP

SEQ ID NO: 177 - protein, 442 aa, homo sapiens
MLEWFNQQRAKGNPISGPICAKRAEFFFYALGMDGDFNPSAGWLTRFKQRHSIREINIRNERLNGDETAVEDFCNNFRDFIERENLQPEQIYNADETGLFWKCLPSRISVIKGKCTVPGHKSIEERVTIMCCANATGLHKLKLCVVGKAKKPRSFKSTDTLNLPVSYFSQKGAWMDLSIFRQWFDKIFVPQVREYLRSKGLQEKAVLLLDNSPTHPNENVLRSDDGQIFAKYLPPNVASLIQPSDQGVIATMKRNYRAGLLQNNLEEGNDLKSFWKKLTLLDALYEIAMAWNLVKPVTISRAWKKILPMVEEKESLDFDVEDISVATVAAILQHTKGLENVTTENLEKWLEVDSTEPGYEVLTDSEIIRRAQGQADESSENEEEEIELIPEKHINHAAALQWTENLLDYLEQQGDMILPDRLVIRKLRATIRNKQKMTKSSQ

SEQ ID NO: 178 - protein, 1246 aa, homo sapiens [sequence omitted]

SEQ ID NO: 179 - protein, 615 aa, homo sapiens
MPSRKFADGEVVRGRWPGSSLYYEVEILSHDSTSQLYTVKYKDGTELELKENDIKPLTSFRQRKGGSTSSSPSRRRGSRSRSRSRSPGRPPKSARRSASASHQADIKEARREVEVKLTPLILKPFGNSISRYNGEPEHIERNDAPHKNTQEKFSLSQESSYIATQYSLRPRREEVKLKEIDSKEEKYVAKELAVRTFEVTPIRAKDLEFGGVPGVFLIMFGLPVFLFLLLLMCKQKDPSLLNFPPPLPALYELWETRVFGVYLLWFLIQVLFYLLPIGKVVEGTPLIDGRRLKYRLNGFYAFILTSAVIGTSLFQGVEFHYVYSHFLQFALAATVFCVVLSVYLYMRSLKAPRNDLSPASSGNAVYDFFIGRELNPRIGTFDLKYFCELRPGLIGWVVINLVMLLAEMKIQDRAVPSLAMILVNSFQLLYVVDALWNEEALLTTMDIIHDGFGFMLAFGDLVWVPFIYSFQAFYLVSHPNEVSWPMASLIIVLKLCGYVIFRGANSQKNAFRKNPSDPKLAHLKTIHTSTGKNLLVSGWWGFVRHPNYLGDLIMALAWSLPCGFNHILPYFYIIYFTMLLVHREARDEYHCKKKYGVAWEKYCQRVPYRIFPYIY

SEQ ID NO: 180 - protein, 1609 aa, homo sapiens [sequence omitted]

SEQ ID NO: 181 - protein, 513 aa, homo sapiens
MKRLLLLFLFFITFSSAFPLVRMMENEENVQLAQAYLNQFYSLEIEGNHLVQSKNRSLIDDKIREMQAFFGLTVTGKLDSNTLEIMKTPRCGVPDVGQYGYTLPGWRKYNLTYRIINYTPDMARAAVDEAIQEGLEVWSKVTPLKFTKISKGIADIMIAFRTRVHGRCPRYFDGPLGVLGHAFPPGPGLGGDTHFDEDENWTKDGAGFNLFLVAAHEFGHALGLSHSNDQTALMFPNYVSLDPRKYPLSQDDINGIQSIYGGLPKEPAKPKEPTIPHACDPDLTFDAITTFRREVMFFKGRHLWRIYYDITDVEFELIASFWPSLPADLQAAYENPRDKILVFKDENFWMIRGYAVLPDYPKSIHTLGFPGRVKKIDAAVCDKTTRKTYFFVGIWCWRFDEMTQTMDKGFPQRVVKHFPGISIRVDAAFQYKGFFFFSRGSKQFEYDIKTKNITRIMRTNTWFQCKEPKNSSFGFDINKEKAHSGGIKILYHKSLSLFIFGIVHLLKNTSIYQ

SEQ ID NO: 182 - protein, 326 aa, homo sapiens
MFGAAARSADLALLEKNLQAAHGCLGLYCGKTLLFKNGSTEIYGECGVCPRGQRTNAQKYCQPCTESPELYDWLYLGFMAMLPLVLHWFFIEWYSGKKSSSALFQHITALFECSMAAIITLLVSDPVGVLYIRSCRVLMLSDWYTMLYNPSPDYVTTVHCTHEAVYPLYTIVFIYYAFCLVLMMLLRPLLVKKIACGLGKSDRFKSIYAALYFFPILTVLQAVGGGLLYYAFPYIILVLSLVTLAVYMSASEIENCYDLLVRKKRLIVLFSHWLLHAYGIISISRVDKLEQDLPLLALVPTPALFYLFTAKFTEPSRILSEGANGH

SEQ ID NO: 183 - protein, 438 aa, homo sapiens [sequence omitted]

SEQ ID NO: 184 - protein, 1533 aa, homo sapiens [sequence omitted]

SEQ ID NO: 185 - protein, 5596 aa, homo sapiens
MEHFLLEVAAAPLRLIAAKNEKSRSELGRFLAKQVWTPQDRQCVLSTLAQLLLDKDCTVLVGRQLRPLLLDLLERNAEAIKAGGQINHDLHERLCVSMSKLIGNHPDVLPFALRYFKDTSPVFQRLFLESSDANPVRYGRRRMKLRDLMEAAFKFLQQEQSVFRELWDWSVCVPLLRSHDTLVRWYTANCLALVTCMNEEHKLSFLKKIFNSDELIHFRLRLLEEAQLQDLEKALVLANPEVSLWRKQKELQYLQGHLVSSDLSPRVTAVCGVVLPGQLPAPGELGGNRSSSREQELALRSYVLVESVCKSLQTLAMAVASQNAVLLEGPIGCGKTSLVEYLAAVTGRTKPPQLLKVQLGDQTDSKMLLGMYRCTDVPGEFVWQPGTLTQAATMGHWILLEDIDYAPLDVVSVLIPLLENGELLIPGRGDCLKVAPGFQFFATRRLLSCGGNWYRPLNSHATLLDKYWTKIHLDNLDKRELNEVLQSRYPSLLAVVDHLLDIYIQLTGEKHHSWSDSSVGCEQAPEEVSEARRENKRPTLEGRELSLRDLLNWCNRIAHSFDSSSLSASLNIFQEALDCFTAMLSEHTSKLKMAEVIGSKLNISRKKAEFFCQLYKPEIVINELDLQVGRVRLLRKQSEAVHLQREKFTFAATRPSSVLIEQLAVCVSKGEPVLLVGETGTGKTSTIQYLAHITGHRLRVVNMNQQSDTADLLGGYKPVDHKLIWLPLREAFEELFAQTFSKKQNFTFLGHIQTCYRQKRWHDLLRLMQHVHKSAVNKDGKDSETGLLIKEKWEAFGLRLNHAQQQMKMTENTLLFAFVEGTLAQAVKKGEWILLDEINLAAPEILECLSGLLEGSSGSLVLLDRGDTEPLVRHPDFRLFACMNPATDVGKRNLPPGIRNRFTELYVEELESKEDLQVLIVDYLKGLSVNKNTVQGIINFYTALRKESGTKLVDGTGHRPHYSLRTLCRALRFAASNPCGNIQRSLYEGFCLGFLTQLDRASHPIVQKLICQHIVPGNVKSLLKQPIPEPKGGRLIQVEGYWIAVGDKEPTIDETYILTSSVKLNLRDIVRVVSAGTYPVLIQGETSVGKTSLIQWLAAATGNHCVRINNHEHTDIQEYIGCYTSDSSGKLVFKEGVLIDAMRKGYWIILDELNLAPTDVLEALNRLLDDNRELLVTETQEVVKAHPRFMLFATQNPPGLYGGRKVLSRAFRNRFVELHFDELPSSELETILHKRCSLPPSYCSKLVKVMLDLQSYRRSSSVFAGKQGFITLRDLFRWAERYRLAEPTEKEYDWLQHLANDGYMLLAGRVRKQEEIDVIQEVLEKHFKKKLCPQSLFSKENVLKLLGKLSTQISTLECNFGHIVWTEGMRRLAMLVGRALEFGEPVLLVGDTGCGKTTICQVFAALANQKLYSVSCHLHMETSDFLGGLRPVRQKPNDKEEIDTSRLFEWHDGPLVQAMKEDGFFLLDEISLADDSVLERLNSVLEVEKSLVLAEKGSPEDKDSEIELLTAGKKFRILATMNPGGDFGKKELSPALRNRFTEIWCPQSTSREDLIQIISHNLRPGLCLGRIDPKGSDIPEVMLDFIDWLTHQEFGRKCVVSIRDILSWVNFMNKMGEEAALKRPEIISTVTSFVHAACLVYIDGIGSGVTSSGFGTALLARKECLKFLIKRLAKIVRLTEYQKNELKIYDRMKAKEFTGIDNLWGIHPFFIPRGPVLHRNNIADYALSAGTTAMNAQRLLRATKLKKPILLEGSPGVGKTSLVGALAKASGNTLVRINLSEQTDITDLFGADLPVEGGKGGEFAWRDGPLLAALKAGHWVVLDELNLASQSVLEGLNACFDHRGEIYVPELGMSFQVQHEKTKIFGCQNPFRQGGGRKGLPRSFLNRFTQVFVDPLTVIDMEFIASTLFPAIEKNIVKKMVAFNNQIDHEVTVEKKWGQKGGPWEFNLRDLFRWCQLMLVDQSPGCYDPGQHVFLVYGERMRTEEDKKKVIAVFKDVFGSNSNPYMGTRLFRITPYDVQLGYSVLSRGSCVPHPSRHPLLLLHQSFQPLESIMKCVQMSWMVILVGPASVGKTSLVQLLAHLTGHTLKIMAMNSAMDTTELLGGFEQVDLIRPWRRLLEKVEGTVRALLRDSLLISADDAEVVLRAWSHFLLTYKPKCLGEGGKAITMEIVNKLEAVLLLMQRLNNKINSYCKAEFAKLVEEFRSFGVKLTQLASGHSHGTFEWVDSMLVQALKSGDWLLMDNVNFCNPSVLDRLNALLEPGGVLTISERGMIDGSTPTITPNPNFRLFLSMDPVHGDISRAMRNRGLEIYISGEGDASTPDNLDLKVLLHSLGLVGNSVCDILLALHTETRSTVVGSPTSSVSTLIQTAILIVQYLQRGLSLDRAFSEACWEVYVCSQHSPANRKLVQALLEKHVSSLRAHETWGDSILGMGLWPDSVPSALFATEDSHLSTVRRDGQILVYCLNRMSMKTSSWTRSQPFTLQDLEKIMQSPSPENLKFNAVEVNTYWIDEPDVLVMAVKLLIERATNQDWMLRVKWLYHLAKNIPQGLESIQIHLEASAASLRNFYSHSLSGAVSNVFKILQPNTTDEFVIPLDPRWNMQALDMIRNLMDFDPQTDQPDQLFALLESAANKTIIYLDREKRVFTEANLVSVGSKKLRESVLRMSFEFHQDPESYHTLPHEIVVNLAAFFELCDALVLLWVQSSQGMVSDASANEILGSLRWRDRFWTVADTVKVDAPGLALLALHWHWVLKHLVHQIPRLLMNYEDKYYKEVQTVSEHIQNCLGSQTGGFAGIKKLQKFLGRPFPFKDKLVVECFSQLKVLNKVLAIREQMSALGESGWQEDINRLQVVASQWTLKKSLLQAWGLILRANILEDVSLDELKNFVHAQCLELKAKGLSLGFLEKKHDEASSLSHPDLTSVIHLTRSVQLWPAMEYLAMLWRYKVTADFMAQACLRRCSKNQQPQINEEISHLISFCLYHTPVTPQELRDLWSLLHHQKVSPEEITSLWSELFNSMFMSFWSSTVTTNPEYWLMWNPLPGMQQREAPKSVLDSTLKGPGNLNRPIFSKCCFEVLTSSWRASPWDVSGLPILSSSHVTLGEWVERTQQLQDISSMLWTNMAISSVAEFRRTDSQLQGQVLFRHLAGLAELLPESRRQEYMQNCEQLLLGSSQAFQHVGQTLGDMAGQEVLPKELLCQLLTSLHHFVGEGESKRSLPEPAQRGSLWVSLGLLQIQTWLPQARFDPAVKREYKLNYVKEELHQLQCEWKTRNLSSQLQTGRDLEDEVVVSYSHPHVRLLRQRMDRLDNLTCHLLKKQAFRPQLPAYESLVQEIHHYVTSIAKAPAVQDLLTRLLQALHIDGPRSAQVAQSLLKEEASWQQSHHQFRKRLSEEYTFYPDAVSPLQASILQLQHGMRLVASELHTSLHSSMVGADRLGTLATALLAFPSVGPTFPTYYAHADTLCSVKSEEVLRGLGKLILKRSGGKELEGKGQKACPTREQLLMNALLYLRSHVLCKGELDQRALQLFRHVCQEIISEWDEQERIAQEKAEQESGLYRYRSRNSRTALSEEEEEEREFRKQFPLHEKDFADILVQPTLEENKGTSDGQEEEAGTNPALLSQNSMQAVMLIHQQLCLNFARSLWYQQTLPPHEAKHYLSLFLSCYQTGASLVTHFYPLMGVELNDRLLGSQLLACTLSHNTLFGEAPSDLMVKPDGPYDFYQHPNVPEARQCQPVLQGFSEAVSHLLQDWPEHPALEQLLVVMDRIRSFPLSSPISKFLNGLEILLAKAQDWEENASRALSLRKHLDLISQMIIRWRKLELNCWSMSLDNTMKRHTEKSTKHWFSIYQMLEKHMQEQTEEQEDDKQMTLMLLVSTLQAFIEGSSLGEFHVRLQMLLVFHCHVLLMPQVEGKDSLCSVLWNLYHYYKQFFDRVQAKIVELRSPLEKELKEFVKISKWNDVSFWSIKQSVEKTHRTLFKFMKKFEAVLSEPCRSSLVESDKEEQPDFLPRPTDGAASELSSIQNLNRALRETLLAQPAAGQATIPEWCQGAAPSGLEGELLRRLPKLRKRMRKMCLTFMKESPLPRLVEGLDQFTGEVISSVSELQSLKVEPSAEKEKQRSEAKHILMQKQRALSDLFKHLAKIGLSYRKGLAWARSKNPQEMLHLHPLDLQSALSIVSSTQEADSRLLTEISSSWDGCQKYFYRSLARHARLNAALATPAKEMGMGNVERCRGFSAHLMKMLVRQRRSLTTLSEQWIILRNLLSCVQEIHSRLMGPQAYPVAFPPQDGVQQWTERLQHLAMQCQILLEQLSWLLQCCPSVGPAPGHGNVQVLGQPPGPCLEGPELSKGQLCGVVLDLIPSNLSYPSPIPGSQLPSGCRMRKQDHLWQQSTTRLTEMLKTIKTVKADVDKIRQQSCETLFHSWKDFEVCSSALSCLSQVSVHLQGLESLFILPGMEVEQRDSQMALVESLEYVRGEISKAMADFTTWKTHLLTSDSQGGNQMLDEGFVEDFSEQMEIAIRAILCAIQNLEERKNEKAEENTDQASPQEDYAGFERLQSGHLTKLLEDDFWADVSTLHVQKIISAISELLERLKSYGEDGTAAKHLFFSQSCSLLVRLVPVLSSYSDLVLFFLTMSLATHRSTAKLLSVLAQVFTELAQKGFCLPKEFMEDSAGEGATEFHDYEGGGIGEGEGMKDVSDQIGNEEQVEDTFQKGQEKDKEDPDSKSDIKGEDNAIEMSEDFDGKMHDGELEEQEEDDEKSDSEGGDLDKHMGDLNGEEADKLDERLWGDDDEEEDEEEEDNKTEETGPGMDEEDSELVAKDDNLDSGNSNKDKSQQDKKEEKEEAEADDGGQGEDKINEQIDERDYDENEVDPYHGNQEKVPEPEALDLPDDLNLDSEDKNGGEDTDNEEGEEENPLEIKEKPEEAGHEAEERGETETDQNESQSPQEPEEGPSEDDKAEGEEEMDTGADDQDGDAAQHPEEHSEEQQQSVEEKDKEADEEGGENGPADQGFQPQEEEEREDSDTEEQVPEALERKEHASCGQTGVENMQNTQAMELAGAAPEKEQGKEEHGSGAADANQAEGHESNFIAQLASQKHTRKNTQSFKRKPGQADNERSMGDHNERVHKRLRTVDTDSHAEQGPAQQPQAQVEDADAFEHIKQGSDAYDAQTYDVASKEQQQSAKDSGKDQEEEEIEDTLMDTEEQEEFKAADVEQLKPEEIKSGTTAPLGFDEMEVEIQTVKTEEDQDPRTDKAHKETENEKPERSRESTIHTAHQFLMDTIFQPFLKDVNELRQELERQLEMWQPRESGNPEEEKVAAEMWQSYLILTAPLSQRLCEELRLILEPTQAAKLKGDYRTGKRLNIRKVIPYIASQFRKDKIWLRRTKPSKRQYQICLAIDDSSSMVDNHTKQLAFESLAVIGNALTLLEVGQIAVCSFGESVKLLHPFHEQFSDYSGSQILRLCKFQQKKTKIAQFLESVANMFAAAQQLSQNISSETAQLLLVVSDGRGLFLEGKERVLAAVQAARNANIFVIFVVLDNPSSRDSILDIKVPIFKGPGEMPEIRSYMEEFPFPYYIILRDVNALPETLSDALRQWFELVTASDHP

SEQ ID NO: 186 - protein, 1607 aa, homo sapiens
MREAAAALVPPPAFAVTPAAAMEEPPPPPPPPPPPPEPETESEPECCLAARQEGTLGDSACKSPESDLEDFSDETNTENLYGTSPPSTPRQMKRMSTKHQRNNVGRPASRSNLKEKMNAPNQPPHKDTGKTVENVEEYSYKQEKKIRAALRTTERDHKKNVQCSFMLDSVGGSLPKKSIPDVDLNKPYLSLGCSNAKLPVSVPMPIARPARQTSRTDCPADRLKFFETLRLLLKLTSVSKKKDREQRGQENTSGFWLNRSNELIWLELQAWHAGRTINDQDFFLYTARQAIPDIINEILTFKVDYGSFAFVRDRAGFNGTSVEGQCKATPGTKIVGYSTHHEHLQRQRVSFEQVKRIMELLEYIEALYPSLQALQKDYEKYAAKDFQDRVQALCLWLNITKDLNQKLRIMGTVLGIKNLSDIGWPVFEIPSPRPSKGNEPEYEGDDTEGELKELESSTDESEEEQISDPRVPEIRQPIDNSFDIQSRDCISKKLERLESEDDSLGWGAPDWSTEAGFSRHCLTSIYRPFVDKALKQMGLRKLILRLHKLMDGSLQRARIALVKNDRPVEFSEFPDPMWGSDYVQLSRTPPSSEEKCSAVSWEELKAMDLPSFEPAFLVLCRVLLNVIHECLKLRLEQRPAGEPSLLSIKQLVRECKEVLKGGLLMKQYYQFMLQEVLEDLEKPDCNIDAFEEDLHKMLMVYFDYMRSWIQMLQQLPQASHSLKNLLEEEWNFTKEITHYIRGGEAQAGKLFCDIAGMLLKSTGSFLEFGLQESCAEFWTSADDSSASDEIIRSVIEISRALKELFHEARERASKALGFAKMLRKDLEIAAEFRLSAPVRDLLDVLKSKQYVKVQIPGLENLQMFVPDTLAEEKSIILQLLNAAAGKDCSKDSDDVLIDAYLLLTKHGDRARDSEDSWGTWEAQPVKVVPQVETVDTLRSMQVDNLLLVVMQSAHLTIQRKAFQQSIEGLMTLCQEQTSSQPVIAKALQQLKNDALELCNRISNAIDRVDHMFTSEFDAEVDESESVTLQQYYREAMIQGYNFGFEYHKEVVRLMSGEFRQKIGDKYISFARKWMNYVLTKCESGRGTRPRWATQGFDFLQAIEPAFISALPEDDFLSLQALMNECIGHVIGKPHSPVTGLYLAIHRNSPRPMKVPRCHSDPPNPHLIIPTPEGFSTRSMPSDARSHGSPAAAAAAAAAVAASRPSPSGGDSVLPKSISSAHDTRGSSVPENDRLASIAAELQFRSLSRHSSPTEERDEPAYPRGDSSGSTRRSWELRTLISQSKDTASKLGPIEAIQKSVRLFEEKRYREMRRKNIIGQVCDTPKSYDNVMHVGLRKVTFKWQRGNKIGEGQYGKVYTCISVDTGELMAMKEIRFQPNDHKTIKETADELKIFEGIKHPNLVRYFGVELHREEMYIFMEYCDEGTLEEVSRLGLQEHVIRLYSKQITIAINVLHEHGIVHRDIKGANIFLTSSGLIKLGDFGCSVKLKNNAQTMPGEVNSTLGTAAYMAPEVITRAKGEGHGRAADIWSLGCVVIEMVTGKRPWHEYEHNFQIMYKVGMGHKPPIPERLSPEGKDFLSHCLESDPKMRWTASQLLDHSFVKVCTDEE

SEQ ID NO: 187 - protein, 473 aa, homo sapiens
MSTELFSSTREEGSSGSGPSFRSNQRKMLNLLLERDTSFTVCPDVPRTPVGKFLGDSANLSILSGGTPKRCLDLSNLSSGEITATQLTTSADLDETGHLDSSGLQEVHLAGMNHDQHLMKCSPAQLLCSTPNGLDRGHRKRDAMCSSSANKENDNGNLVDSEMKYLGSPITTVPKLDKNPNLGEDQAEEISDELMEFSLKDQEAKVSRSGLYRSPSMPENLNRPRLKQVEKFKDNTIPDKVKKKYFSGQGKLRKGLCLKKTVSLCDITITQMLEEDSNQGHLIGDFSKVCALPTVSGKHQDLKYVNPETVAALLSGKFQGLIEKFYVIDCRYPYEYLGGHIQGALNLYSQEELFNFFLKKPIVPLDTQKRIIIVFHCEFSSERGPRMCRCLREEDRSLNQYPALYYPELYILKGGYRDFFPEYMELCEPQSYCPMHHQDHKTELLRCRSQSKVQEGERQLREQIALLVKDMSP

SEQ ID NO: 188 - protein, 6885 aa, homo sapiens
MASSPELPTEDEQGSWGIDDLHISLQAEQEDTQKKAFTCWINSQLARHTSPSVISDLFTDIKKGHVLLDLLEVLSGQQLPRDKGSNTFQCRINIEHALTFLRNRSIKLINIHVTDIIDGNPSIILGLIWTIILHFHIEKLAQTLSCNYNQPSLDDVSVVDSSPASSPPAKKCSKVQARWQMSARKALLLWAQEQCATYESVNVTDFKSSWRNGMAFLAIIHALRPDLIDMKSVKHRSNKDNLREAFRIAEQELKIPRLLEPEDVDVVDPDEKSIMTYVAQFLQYSKDAPGTGEEAQGKVKDAMGWLTLQKEKLQKLLKDSENDTYFKKYNSLLSFMESFNEEKKSFLDVLSIKRDLDELDKDHLQLREAWDGLDHQINAWKIKLNYALPPPLHQTEAWLQEVEELMDEDLSASQDHSQAVTLIQEKMTLFKSLMDRFEHHSNILLTFENKDENHLPLVPPNKLEEMKRRINNILEKKFILLLEFHYYKCLVLGLVDEVKSKLDIWNIKYGSRESVELLLEDWHKFIEEKEFLARLDTSFQKCGEIYKNLAGECQNINKQYMMVKSDVCMYRKNIYNVKSTLQKVLACWATYVENLRLLRACFEETKKEEIKEVPFETLAQWNLEHATLNEAGNFLVEVSNDVVGSSISKELRRLNKRWRKLVSKTQLEMNLPLMIKKQDQPTFDNSGNILSKEEKATVEFSTDMSVELPENYNQNIKAGEKHEKENEEFTGQLKVAKDVEKLIGQVEIWEAEAKSVLDQDDVDTSMEESLKHLIAKGSMFDELMARSEDMLQMDIQNISSQESFQHVLTTGLQAKIQEAKEKVQINVVKLIAALKNLTDVSPDLDIRLKMEESQKELESYMMRAQQLLGQRESPGELISKHKEALIISNTKSLAKYLKAVEELKNNVTEDIKMSLEEKSRDVCAKWESLHHELSLYVQQLKIDIEKGKLSDNILKLEKQINKEKKLIRRGRTKGLIKEHEACFSEEGCLYQLNHHMEVLRELCEELPSQKSQQEVKRLLKDYEQKIERLLKCASEIHMTLQPTAGGTSKNEGTITTSENRGGDPHSEAPFAKSDNQPSTEKAMEPTMKFSLASVLRPLQEESIMEKDYSASINSLLERYDTYRDILEHHLQNNKFRITSDFSSEEDRSSSCLQAKLTDLQVIKNETDARWKEFEIISLKLENHVNDIKKPFVIKERDTLKERERELQMTLNTRMESLETALRLVLPVEKASLLLCGSDLPLHKMAIQGFHLIDADRIYQHLRNIQDSIAKQIEICNRLEEPGNFVLKELHPFDLHAMQNIILKYKTQFEGMNHRVQRSEDTLKALEDFLASLRTAKLSAEPVTDLSASDTQVAQENTLTVKNKEGEIHLMKDKAKHLDKCLKMLDMSFKDAERGDDTSCENLLDAFSIKLSETHGYGVQEEFTEENKLLEACIFKNNELLKNIQDVQSQISKIGLKDPTVPAVKHRKKSLIRLDKVLDEYEEEKRHLQEMANSLPHFKDGREKTVNQQCQNTVVLWENTKALVTECLEQCGRVLELLKQYQNFKSILTTLIQKEESVISLQASYMGKENLKKRIAEIEIVKEEFNEHLEVVDKINQVCKNLQFYLNKMKTFEEPPFEKEANIIVDRWLDINEKTEDYYENLGRALALWDKLFNLKNVIDEWTEKALQKMELHQLTEEDRERLKEELQVHEQKTSEFSRRVAEIQFLLQSSEIPLELQVMESSILNKMEHVQKCLTGESNCHALSGSTAELREDLDQAKTQIGMTESLLKALSPSDSLEIFTKLEEIQQQILQQKHSMILLENQIGCLTPELSELKKQYESVSDLFNTKKSVLQDHFSKLLNDQCKNFNDWFSNIKVNLKECFESSETKKSVEQKLQKLSDFLTLEGRNSKIKQVDSVLKHVKKHLPKAHVKELISWLVGQEFELEKMESICQARAKELEDSLQQLLRLQDDHRNLRKWLTNQEEKWKGMEEPGEKTELFCQALARKREQFESVAQLNNSLKEYGFTEEEEIIMEATCLMDRYQTLLRQLSEIEEEDKLLPTEDQSFNDLAHDVIHWIKEIKESLMVLNSSEGKMPLEERIQKIKEIILLKPEGDARIETIMKQAESSEAPLVQKTLTDISNQWDNTLHLASTYLSHQEKLLLEGEKYLQSKEDLRLMLIELKKKQEAGFALQHGLQEKKAQLKIYKKFLKKAQDLTSLLKELKSQGNYLLECTKNPSFSEEPWLEIKHLHESLLQQLQDSVQNLDGHVREHDSYQVCVTDLNTTLDNFSKEFVSFSDKPVDQIAVEEKLQKLQELENRLSLQDGTLKKILALAKSVKQNTSSVGQKIIKDDIKSLQCKQKDLENRLASAKQEMECCLNSILKSKRSTEKKGKFTLPGREKQATSDVQESTQESAAVEKLEEDWEINKDSAVEMAMSKQLSLNAQESMKNTEDERKVNELQNQPLELDTMLRNEQLEEIEKLYTQLEAKKAAIKPLEQTECLNKTETGALVLHNIGYSAQHLDNLLQALITLKKNKESQYCVLRDFQEYLAAVESSMKALLTDKESLKVGPLDSVTYLDKIKKFIASIEKEKDSLGNLKIKWENLSNHVTDMDKKLLESQIKQLEHGWEQVEQQIQKKYSQQVVEYDEFTTLMNKVQDTEISLQQQQQHLQLRLKSPEERAGNQSMIALTTDLQATKHGFSVLKGQAELQMKRIWGEKEKKNLEDGINNLKKQWETLEPLHLEAENQIKKCDIRNKMKETILWAKNLLGELNPSIPLLPDDILSQIRKCKVTHDGILARQQSVESLAEEVKDKVPSLTTYEGSDLNNTLEDLRNQYQMLVLKSTQRSQQLEFKLEERSNFFAIIRKFQLMVQESETLIIPRVETAATEAELKHHHVTLEASQKELQEIDSGISTHLQELTNIYEELNVFERLFLEDQLKNLKIRTNRIQRFIQNTCNEVEHKIKFCRQFHEKTSALQEEADSIQRNELLLNQEVNKGVKEEIYNLKDRLTAIKCCILQVLKLKKVFDYIGLNWDFSQLDQLQTQVFEKEKELEEKIKQLDTFEEEHGKYQALLSKMRAIDLQIKKMTEVVLKAPDSSPESRRLNAQILSQRIEKAKCLCDEIIKKLNENKTFDDSFKEKEILQIKLNAEENDKLYKVLQNMVLELSPKELDEKNCQDKLETSLHVLNQIKSQLQQPLLINLEIKHIQNEKDNCEAFQEQVWAEMCSIKAVTAIEKQREENSSEASDVETKLREFEDLQMQLNTSIDLRTNVLNDAYENLTRYKEAVTRAVESITSLEAIIIPYRVDVGNPEESLEMPLRKQEELESTVAHIQDLTEKLGMISSPEAKLQLQYTLQELVSKNSAMKEAFKAQETEAERYLENYKCYRKMEEDIYTNLSKMETVLGQSMSSLPLSYREALERLEQSKALVSNLISTKEELMKLRQILRLLRLRCTENDGICLLKIVSALWEKWLSLLEAAKEWEMWCEELKQEWKFVSEEIEREAIILDNLQEELPEISKTKEAATTEELSELLDCLCQYGENVEKQQLLLTLLLQRIRSIQNVPESSGAVETVPAFQEITSMKERCNKLLQKVQKNKELVQTEIQERHSFTKEIIALKNFFQQTTTSFQNMAFQDHPEKSEQFEELQSILKKGKLTFENIMEKLRIKYSEMYTIVPAEIESQVEECRKALEDIDEKISNEVLKSSPSYAMRRKIEEINNGLHNVEKMLQQKSKNIEKAQEIQKKMWDELDLWHSKLNELDSEVQDIVEQDPGQAQEWMDNLMIPFQQYQQVSQRAECRTSQLNKATVKMEEYSDLLKSTEAWIENTSHLLANPADYDSLRTLSHHASTVQMALEDSEQKHNLLHSIFMDLEDLSIIFETDELTQSIQELSNQVTALQQKIMESLPQIQRMADDVVAIESEVKSMEKRVSKIKTILLSKEIFDFSPEEHLKHGEVILENIRPMKKTIAEIVSYQVELRLPQTGMKPLPVFQRTNQLLQDIKLLENVTQEQNELLKVVIKQTNEWDEEIENLKQILNNYSAQFSLEHMSPDQADKLPQLQGEIERMEKQILSLNQRKEDLLVDLKATVLNLHQHLKQEQEGVERDRLPAVTSEEGGVAERDASERKLNRRGSMSYLAAVEEEVEESSVKSDNGDEKAEPSPQSWSSLWKHDKDMEEDRASSSSGTIVQEAYGKISTSDNSMAQILTPDSLNTEQGPECSLRPNQTEEGTTPPIEADTLDSSDAQGGLEPRVEKTRPEPTEVLHACKTQVAELELWLQQANVAVEPETLNADMQQVLEQQLVGCQAMLTEIEHKVAFLLETCKDQGLGDNGATQHEAEALSLKLKTVKCNLEKVQMMLQEKHSEDQHPTILKKSSEPEHQEALQPVNLSELESIVTERPQFSRQKDFQQQQVLELKPMEQKDFIKFIEFNAKKMWPQYCQHDNDTTQESSASNQASSPENDVPDSILSPQGQNGDKWQYLHHELSSKIKLPLPQLVEPQVSTNMGILPSVTMYNFRYPTTEELKTYTTQLEDLRQEASNLQTQENMTEEAYINLDKKLFELFLTLSQCLSSVEEMLEMPRLYREDGSGQQVHYETLALELKKLYLALSDKKGDLLKAMTWPGENTNLLLECFDNLQVCLEHTQAAAVCRSKSLKAGLDYNRSYQNEIKRLYHQLIKSKTSLQQSLNEISGQSVAEQLQKADAYTVELENAESRVAKLRDEGERLHLPYALLQEVYKLEDVLDSMWGMLRARYTELSSPFVTESQQDALLQGMVELVKIGKEKLAHGHLKQTKSKVALQAQIENHKVFFQKLVADMLLIQAYSAKILPSLLQNRETFWAEQVTEVKILEEKSRQCGMKLQSLLQKWEEFDENYASLEKDLEILISTLPSVSLVEETEERLVERISFYQQIKRNIGGKHARLYQTLNEGKQLVASVSCPELEGQIAKLEEQWLSLNKKIDHELHRLQALLKHLLSYNRDSDQLTKWLESSQHTLNYWKEQSLNVSQDLDTIRSNINNFFEFSKEVDEKSSLKTAVISIGNQLLHLKETDTATLRASLAQFEQKWTMLITQLPDIQEKLHQLQMEKLPSRKAITEMISWMNNVEHQTSDEDSVHSPSSASQVKHLLQKHKEFRMEMDYKQWIVDFVNQSLLQLSTCDVESKRYERTEFAEHLGEMNRQWHRVHGMLNRKIQHLEQLLESITESENKIQILNNWLEAQEERLKTLQKPESVISVQKLLLDCQDIENQLAIKSKALDELKQSYLTLESGAVPLLEDTASRIDELFQKRSSVLTQVNQLKTSMQSVLQEWKIYDQLYDEVNMMTIRFWYCMEHSKPVVLSLETLRCQVENLQSLQDEAESSEGSWEKLQEVIGKLKGLCPSVAEIIEEKCQNTHKRWTQVNQAIADQLQKAQSLLQLWKAYSNAHGEAAARLKQQEAKFQQLANISMSGNNLAEILPPALQDIKELQHDVQKTKEAFLQNSSVLDRLPQPAESSTHMLLPGPLHSLQRAAYLEKMLLVKANEFEFVLSQFKDFGVRLESLKGLIMHEEENLDRLHQQEKENPDSFLNHVLALTAQSPDIEHLNEVSLKLPLSDVAVKTLQNMNRQWIRATATALERCSELQGIGLNEKFLYCCEKWIQLLEKIEEALKVDVANSLPELLEQQKTYKMLEAEVSINQTIADSYVTQSLQLLDTTEIENRPEFITEFSKLTDRWQNAVQGVRQRKGDVDGLVRQWQDFTTSVENLFRFLTDTSHLLSAVKGQERFSLYQTRSLIHELKNKEIHFQRRRTTCALTLEAGEKLLLTTDLKTKESVGRRISQLQDSWKDMEPQLAEMIKQFQSTVETWDQCEKKIKELKSRLQVLKAQSEDPLPELHEDLHNEKELIKELEQSLASWTQNLKELQTMKADLTRHVLVEDVMVLKEQIEHLHRQWEDLCLRVAIRKQEIEDRLNTWVVFNEKNKELCAWLVQMENKVLQTADISIEEMIEKLQKDCMEEINLFSENKLQLKQMGDQLIKASNKSRAAEIDDKLNKINDRWQHLFDVIGSRVKKLKETFAFIQQLDKNMSNLRTWLARIESELSKPVVYDVCDDQEIQKRLAEQQDLQRDIEQHSAGVESVFNICDVLLHDSDACANETECDSIQQTTRSLDRRWRNICAMSMERRMKIEETWRLWQKFLDDYSRFEDWLKSAERTAACPNSSEVLYTSAKEELKRFEAFQRQIHERLTQLELINKQYRRLARENRTDTASRLKQMVHEGNQRWDNLQRRVTAVLRRLRHFTNQREEFEGTRESILVWLTEMDLQLTNVEHFSESDADDKMRQLNGFQQEITLNTNKIDQLIVFGEQLIQKSEPLDAVLIEDELEELHRYCQEVFGRVSRFHRRLTSCTPGLEDEKEASENETDMEDPREIQTDSWRKRGESEEPSSPQSLCHLVAPGHERSGCETPVSVDSIPLEWDHTGDVGGSSSHEEDEEGPYYSALSGKSISDGHSWHVPDSPSCPEHHYKQMEGDRNVPPVPPASSTPYKPPYGKLLLPPGTDGGKEGPRVLNGNPQQEDGGLAGITEQQSGAFDRWEMIQAQELHNKLKIKQNLQQLNSDISAITTWLKKTEAELEMLKMAKPPSDIQEIELRVKRLQEILKAFDTYKALVVSVNVSSKEFLQTESPESTELQSRLRQLSLLWEAAQGAVDSWRGGLRQSLMQCQDFHQLSQNLLLWLASAKNRRQKAHVTDPKADPRALLECRRELMQLEKELVERQPQVDMLQEISNSLLIKGHGEDCIEAEEKVHVIEKKLKQLREQVSQDLMALQGTQNPASPLPSFDEVDSGDQPPATSVPAPRAKQFRAVRTTEGEEETESRVPGSTRPQRSFLSRVVRAALPLQLLLLLLLLLACLLPSSEEDYSCTQANNFARSFYPMLRYTNGPPPT

SEQ ID NO: 189 - protein, 2960 aa, homo sapiens
MPGIKVGGSGVNVNAKGLDLGGRGGVQVPAVDISSSLGGRPVEVQGPSLESGDHAKIKFPTMKVPKFGVSTGREGQTPKAGLRVSAPEVSVGHKGGKPGLTIQAPQLEVSVPSANIEGLEGKLKGPQITGPSLEGDLGLKGAKPQGHIGVDASAPQIGGSITGPSVEVQAPDIDVQGPGSKLNVPKMKVPKFSVSGAKGEETGIDVTLPTGEVTVPGVSGDVSLPEIATGGLEGKMKGTKVKTPEMIIQKPKISMQDVDLSLGSPKLKGDIKVSAPGVQGDVKGPQVALKGSRVDIETPNLEGTLTGPRLGSPSGKTGTCRISMSEVDLNVAAPKVKGGVDVTLPRVEGKVKVPEVDVRGPKVDVSAPDVEAHGPEWNLKMPKMKMPTFSTPGAKGEGPDVHMTLPKGDISISGPKVNVEAPDVNLEGLGGKLKGPDVKLPDMSVKTPKISMPDVDLHVKGTKVKGEYDVTVPKLEGELKGPKVDIDAPDVDVHGPDWHLKMPKMKMPKFSVPGFKAEGPEVDVNLPKADVDISGPKIDVTAPDVSIEEPEGKLKGPKFKMPEMNIKVPKISMPDVDLHLKGPNVKGEYDVTMPKVESEIKVPDVELKSAKMDIDVPDVEVQGPDWHLKMPKMKMPKFSMPGFKAEGPEVDVNLPKADVDISGPKVGVEVPDVNIEGPEGKLKGPKFKMPEMNIKAPKISMPDVDLHMKGPKVKGEYDMTVPKLEGDLKGPKVDVSAPDVEMQGPDWNLKMPKIKMPKFSMPSLKGEGPEFDVNLSKANVDISAPKVDTNAPDLSLEGPEGKLKGPKFKMPEMHFRAPKMSLPDVDLDLKGPKMKGNVDISAPKIEGEMQVPDVDIRGPKVDIKAPDVEGQGLDWSLKIPKMKMPKFSMPSLKGEGPEVDVNLPKADVDVSGPKVDIEAPDVSLEGPEGKLKGPKFKMPEMHFKTPKISMPDVDLHLKGPKVKGDVDVSVPKVEGEMKVPDVEIKGPKMDIDAPDVEVQGPDWHLKMPKMKMPKFSMPGFKGEGREVDVNLPKADIDVSGPKVDVEVPDVSLEGPEGKLKGPKFKMPEMHFKAPKISMPDVDLNLKGPKLKGDVDVSLPEVEGEMKVPDVDIKGPKVDISAPDVDVHGPDWHLKMPKVKMPKFSMPGFKGEGPEVDVKLPKADVDVSGPKMDAEVPDVNIEGPDAKLKGPKFKMPEMSIKPQKISIPDVGLHLKGPKMKGDYDVTVPKVEGEIKAPDVDIKGPKVDINAPDVEVHGPDWHLKMPKVKMPKFSMPGFKGEGPEVDMNLPKADLGVSGPKVDIDVPDVNLEAPEGKLKGPKFKMPSMNIQTHKISMPDVGLNLKAPKLKTDVDVSLPKVEGDLKGPEIDVKAPKMDVNVGDIDIEGPEGKLKGPKFKMPEMHFKAPKISMPDVDLHLKGPKVKGDMDVSVPKVEGEMKVPDVDIKGPKVDIDAPDVEVHDPDWHLKMPKMKMPKFSMPGFKAEGPEVDVNLRKADIDVSGPSVDTDAPDLDIEGPEGKLKGSKFKMPKLNIKAPKVSMPDVDLNLKGPKLKGEIDASVPELEGDLRGPQVDVKGPLVEAEVPDVDLECPDAKLKGPKFKMPEMHFKAPKISMPDVDLHLKGPKVKGDADVSVPKLEGDLTGPSVGVEVPDVELECPDAKLKGPKFKMPDMHFKAPKISMPDVDLHTLPKVEGDLKGPEADIKGPKVDINTPDVDVHGPDWHLKMPKVKMPKFSMPGFKGEGPDVDVNLPKADIDVSGPKVDVDVPDVNIEGPDAKLKGPKFKMPEMSIKAPKISMPDIDLNLKGPKVKGDVDVTLPKVEGDLKGPEADIKGPKVDINTPDVDVHGPDWHLKMPKVKMPKFSMPGFKGEGPDVDVSLPKADIDVSGPKVDVDIPDVNIEGPDPKLKVPKVKMPEINIKAPKISIPDVDLDLKGPKVKGDFDVSVPKVEGTLKGPEVDLKGPRLDFEGPDAKLSGPSLKMPSLEISAPKVTAPDVDLHLKAPKIGFSGPKLEGGEVDLKGPKVEAPSLDVHMDSPDINIEGPDVKIPKFKKPKFGFGPKSPKADIKSPSLDVTVPEAELNLETPEISVGGKGKKSKFKMPKIHMSGPKIKAKKQGFDLNVPGGEIDASLKAPDVDVNIAGPDAALKVDVKSPKTKKTMFGKMYFPDVEFDIKSPKFKAEAPLPSPKLEGELQAPDLELSLPAIHVEGLDIKAKAPKVKMPDVDISVPKIEGDLKGPKVQANLGAPDINIEGLDAKVKTPSFGISAPQVSIPDVNVNLKGPKIKGDVPSVGLEGPDVDLQGPEAKIKFPKFSMPKIGIPGVKMEGGGAEVHAQLPSLEGDLRGPDVKLEGPDVSLKGPGVDLPSVNLSMPKVSGPDLDLNLKGPSLKGDLDASVPSMKVHAPGLNLSGVGGKMQVGGDGVKVPGIDATTKLNVGAPDVTLRGPSLQGDLAVSGDIKCPKVSVGAPDLSLEASEGSIKLPKMKLPQFGISTPGSDLHVNAKGPQVSGELKGPGVDVNLKGSRISAPNVDFNLEGPKVKGSLGATGEIKGPTVGGGLPGIGVQGLEGNLQMPGIKSSGCDVNLPGVNVKLPTGQISGPEIKGGLKGSEVGFHGAAPDISVKGPAFNMASPESDFGINLKGPKIKGGADVSGGVSAPDISLGEGHLSVKGSGGEWKGPQVSSALNLDTSKFAGGLHFSGPKVEGGVKGGQIGLQAPGLSVSGPQGHLESGSGKVTFPKMKIPKFTFSGRELVGREMGVDVHFPKAEASIQAGAGDGEWEESEVKLKKSKIKMPKFNFSKPKGKGGVTGSPEASISGSKGDLKSSKASLGSLEGEAEAEASSPKGKFSLFKSKKPRHRSNSFSDEREFSGPSTPTGTLEFEGGEVSLEGGKVKGKHGKLKFGTFGGLGSKSKGHYEVTGSDDETGKLQGSGVSLASKKSRLSSSSSNDSGNKVGIQLPEVELSVSTKKE

SEQ ID NO: 190 - protein, 390 aa, homo sapiens
MRGDRGRGRGGRFGSRGGPGGGFRPFVPHIPFDFYLCEMAFPRVKPAPDETSFSEALLKRNQDLAPNSAEQASILSLVTKINNVIDNLIVAPGTFEVQIEEVRQVGSYKKGTMTTGHNVADLVVILKILPTLEAVAALGNKVVESLRAQDPSEVLTMLTNETGFEISSSDATVKILITTVPPNLRKLDPELHLDIKVLQSALAAIRHARWFEENASQSTVKVLIRLLKDLRIRFPGFEPLTPWILDLLGHYAVMNNPTRQPLALNVAYRRCLQILAAGLFLPGSVGITDPCESGNFRVHTVMTLEQQDMVCYTAQTLVRILSHGGFRKILGQEGDASYLASEISTWDGVIVTPSEKAYEKPPEKKEGEEEEENTEEPPQGEEEESMETQE

SEQ ID NO: 191 - protein, 594 aa, homo sapiens
MVLLHVLFEHAVGYALLALKEVEEISLLQPQVEESVLNLGKFHSIVRLVAFCPFASSQVALENANAVSEGVVHEDLRLLLETHLPSKKKKVLLGVGDPKIGAAIQEELGYNCQTGGVIAEILRGVRLHFHNLVKGLTDLSACKAQLGLGHSYSRAKVKFNVNRVDNMIIQSISLLDQLDKDINTFSMRVREWYGYHFPELVKIINDNATYCRLAQFIGNRRELNEDKLEKLEELTMDGAKAKAILDASRSSMGMDISAIDLINIESFSSRVVSLSEYRQSLHTYLRSKMSQVAPSLSALIGEAVGARLIAHAGSLTNLAKYPASTVQILGAEKALFRALKTRGNTPKYGLIFHSTFIGRAAAKNKGRISRYLANKCSIASRIDCFSEVPTSVFGEKLREQVEERLSFYETGEIPRKNLDVMKEAMVQAEEAAAEITRKLEKQEKKRLKKEKKRLAALALASSENSSSTPEECEEMSEKPKKKKKQKPQEVPQENGMEDPSISFSKPKKKKSFSKEELMSSDLEETAGSTSIPKRKKSTPKEETVNDPEEAGHRSGSKKKRKFSKEEPVSSGPEEAVGKSSSKKKKKFHKASQED

SEQ ID NO: 192 - protein, 336 aa, homo sapiens
MEKLRLLGLRYQEYVTRHPAATAQLETAVRGFSYLLAGRFADSHELSELVYSASNLLVLLNDGILRKELRKKLPVSLSQQKLLTWLSVLECVEVFMEMGAAKVWGEVGRWLVIALIQLAKAVLRMLLLLWFKAGLQTSPPIVPLDRETQAQPPDGDHSPGNHEQSYVGKRSNRVVRTLQNTPSLHSRHWGAPQQREGRQQQHHEELSATPTPLGLQETIAEFLYIARPLLHLLSLGLWGQRSWKPWLLAGVVDVTSLSLLSDRKGLTRRERRELRRRTILLLYYLLRSPFYDRFSEARILFLLQLLADHVPGVGLVTRPLMDYLPTWQKIYFYSWG

SEQ ID NO: 193 - protein, 376 aa, homo sapiens
MDVLAEANGTFALNLLKTLGKDNSKNVFFSPMSMSCALAMVYMGAKGNTAAQMAQILSFNKSGGGGDIHQGFQSLLTEVNKTGTQYLLRVANRLFGEKSCDFLSSFRDSCQKFYQAEMEELDFISAVEKSRKHINTWVAEKTEGKIAELLSPGSVDPLTRLVLVNAVYFRGNWDEQFDKENTEERLFKVSKNEEKPVQMMFKQSTFKKTYIGEIFTQILVLPYVGKELNMIIMLPDETTDLRTVEKELTYEKFVEWTRLDMMDEEEVEVSLPRFKLEESYDMESVLRNLGMTDAFELGKADFSGMSQTDLSLSKVVHKSFVEVNEEGTEAAAATAAIMMMRCARFVPRFCADHPFLFFIQHSKTNGILFCGRFSSP

SEQ ID NO: 194 - protein, 472 aa, homo sapiens
MGCDRNCGLIAGAVIGAVLAVFGGILMPVGDLLIQKTIKKQVVLEEGTIAFKNWVKTGTEVYRQFWIFDVQNPQEVMMNSSNIQVKQRGPYTYRVRFLAKENVTQDAEDNTVSFLQPNGAIFEPSLSVGTEADNFTVLNLAVAAASHIYQNQFVQMILNSLINKSKSSMFQVRTLRELLWGYRDPFLSLVPYPVTTTVGLFYPYNNTADGVYKVFNGKDNISKVAIIDTYKGKRNLSYWESHCDMINGTDAASFPPFVEKSQVLQFFSSDICRSIYAVFESDVNLKGIPVYRFVLPSKAFASPVENPDNYCFCTEKIISKNCTSYGVLDISKCKEGRPVYISLPHFLYASPDVSEPIDGLNPNEEEHRTYLDIEPITGFTLQFAKRLQVNLLVKPSEKIQVLKNLKRNYIVPILWLNETGTIGDEKANMFRSQVTGKINLLGLIEMILLSVGVVMFVAFMISYCACRSKTIK

SEQ ID NO: 195 - protein, 4684 aa, homo sapiens
MVAGMLMPRDQLRAIYEVLFREGVMVAKKDRRPRSLHPHVPGVTNLQVMRAMASLRARGLVRETFAWCHFFWYLTNEGIAHLRQYLHLPPEIVAASLQRVRRPVAMVMPARRTPHVQAVQGPLGSPPKRGPLPTEEQRLYRRKELEEVSPETPVVPATTQRTLARPGPEPAPATDERDRVQKKTFTKWVNKHLIKAQRHISDLYEDLRDGHNLISLLEVLSGDSLPREKGRMRFHKLQNVQIALDYLRHRQVKLVNIRNDDIADGNPKLTLGLIWTIILHFQISDIQVSGQSEDMTAKEKLLLWSQRMVEGYQGLRCDNFTSSWRDGRLFNAIIHRHKPLLIDMNKVYRQTNLENLDQAFSVAERDLGVTRLLDPEDVDVPQPDEKSIITYVSSLYDAMPRVPDVQDGVRANELQLRWQEYRELVLLLLQWMRHHTAAFEERRFPSSFEEIEILWSQFLKFKEMELPAKEADKNRSKGIYQSLEGAVQAGQLKVPPGYHPLDVEKEWGKLHVAILEREKQLRSEFERLECLQRIVTKLQMEAGLCEEQLNQADALLQSDVRLLAAGKVPQRAGEVERDLDKADSMIRLLFNDVQTLKDGRHPQGEQMYRRVYRLHERLVAIRTEYNLRLKAGVAAPATQVAQVTLQSVQRRPELEDSTLRYLQDLLAWVEENQHRVDGAEWGVDLPSVEAQLGSHRGLHQSIEEFRAKIERARSDEGQLSPATRGAYRDCLGRLDLQYAKLLNSSKARLRSLESLHSFVAAATKELMWLNEKEEEEVGFDWSDRNTNMTAKKESYSALMRELELKEKKIKELQNAGDRLLREDHPARPTVESFQAALQTQWSWMLQLCCCIEAHLKENAAYFQFFSDVREAEGQLQKLQEALRRKYSCDRSATVTRLEDLLQDAQDEKEQLNEYKGHLSGLAKRAKAVVQLKPRHPAHPMRGRLPLLAVCDYKQVEVTVHKGDECQLVGPAQPSHWKVLSSSGSEAAVPSVCFLVPPPNQEAQEAVTRLEAQHQALVTLWHQLHVDMKSLLAWQSLRRDVQLIRSWSLATFRTLKPEEQRQALHSLELHYQAFLRDSQDAGGFGPEDRLMAEREYGSCSHHYQQLLQSLEQGAQEESRCQRCISELKDIRLQLEACETRTVHRLRLPLDKEPARECAQRIAEQQKAQAEVEGLGKGVARLSAEAEKVLALPEPSPAAPTLRSELELTLGKLEQVRSLSAIYLEKLKTISLVIRGTQGAEEVLRAHEEQLKEAQAVPATLPELEATKASLKKLRAQAEAQQPTFDALRDELRGAQEVGERLQQRHGERDVEVERWRERVAQLLERWQAVLAQTDVRQRELEQLGRQLRYYRESADPLGAWLQDARRRQEQIQAMPLADSQAVREQLRQEQALLEEIERHGEKVEECQRFAKQYINAIKDYELQLVTYKAQLEPVASPAKKPKVQSGSESVIQEYVDLRTHYSELTTLTSQYIKFISETLRRMEEEERLAEQQRAEERERLAEVEAALEKQRQLAEAHAQAKAQAEREAKELQQRMQEEVVRREEAAVDAQQQKRSIQEELQQLRQSSEAEIQAKARQAEAAERSRLRIEEEIRVVRLQLEATERQRGGAEGELQALRARAEEAEAQKRQAQEEAERLRRQVQDESQRKRQAEVELASRVKAEAEAAREKQRALQALEELRLQAEEAERRLRQAEVERARQVQVALETAQRSAEAELQSKRASFAEKTAQLERSLQEEHVAVAQLREEAERRAQQQAEAERAREEAERELERWQLKANEALRLRLQAEEVAQQKSLAQAEAEKQKEEAEREARRRGKAEEQAVRQRELAEQELEKQRQLAEGTAQQRLAAEQELIRLRAETEQGEQQRQLLEEELARLQREAAAATQKRQELEAELAKVRAEMEVLLASKARAEEESRSTSEKSKQRLEAEAGRFRELAEEAARLRALAEEAKRQRQLAEEDAARQRAEAERVLAEKLAAIGEATRLKTEAEIALKEKEAENERLRRLAEDEAFQRRRLEEQAAQHKADIEERLAQLRKASDSELERQKGLVEDTLRQRRQVEEEILALKASFEKAAAGKAELELELGRIRSNAEDTLRSKEQAELEAARQRQLAAEEERRRREAEERVQKSLAAEEEAARQRKAALEEVERLKANVEEARRLRERAEQESARQLQLAQEAAQKRLQAEEKAHAFAVQQKEQELQQTLQQEQSVLDQLRGEAEAARRAAEEAEEARVQAEREAAQARRQVEEAERLKQSAEEQAQARAQAQAAAEKLRKEAEQEAARRAQAEQAALRQKQAADAEMEKHKKFAEQTLRQKAQVEQELTTLRLQLEETDHQKNLLDEELQRLKAEATEAARQRSQVEEELFSVRVQMEELSKLKARIEAENRALILRDKDNTQRFLQEEAEKMKQVAEEAARLSVAAQEAARLRQLAEEDLAQQRALAEKMLKEKMQAVQEATRLKAEAELLQQQKELAQEQARRLQEDKEQMAQQLAEETQGFQRTLEAERQRQLEMSAEAERLKLRVAEMSRAQARAEEDAQRFRKQAEEIGEKLHRTELATQEKVTLVQTLEIQRQQSDHDAERLREAIAELEREKEKLQQEAKLLQLKSEEMQTVQQEQLLQETQALQQSFLSEKDSLLQRERFIEQEKAKLEQLFQDEVAKAQQLREEQQRQQQQMEQERQRLVASMEEARRRQHEAEEGVRRKQEELQQLEQQRRQQEELLAEENQRLREQLQLLEEQHRAALAHSEEVTASQVAATKTLPNGRDALDGPAAEAEPEHSFDGLRRKVSAQRLQEAGILSAEELQRLAQGHTTVDELARREDVRHYLQGRSSIAGLLLKATNEKLSVYAALQRQLLSPGTALILLEAQAASGFLLDPVRNRRLTVNEAVKEGVVGPELHHKLLSAERAVTGYKDPYTGQQISLFQAMQKGLIVREHGIRLLEAQIATGGVIDPVHSHRVPVDVAYRRGYFDEEMNRVLADPSDDTKGFFDPNTHENLTYLQLLERCVEDPETGLCLLPLTDKAAKGGELVYTDSEARDVFEKATVSAPFGKFQGKTVTIWEIINSEYFTAEQRRDLLRQFRTGRITVEKIIKIIITVVEEQEQKGRLCFEGLRSLVPAAELLESRVIDRELYQQLQRGERSVRDVAEVDTVRRALRGANVIAGVWLEEAGQKLSIYNALKKDLLPSDMAVALLEAQAGTGHIIDPATSARLTVDEAVRAGLVGPEFHEKLLSAEKAVTGYRDPYTGQSVSLFQALKKGLIPREQGLRLLDAQLSTGGIVDPSKSHRVPLDVACARGCLDEETSRALSAPRADAKAYSDPSTGEPATYGELQQRCRPDQLTGLSLLPLSEKAARARQEELYSELQARETFEKTPVEVPVGGFKGRTVTVWELISSEYFTAEQRQELLRQFRTGKVTVEKVIKILITIVEEVETLRQERLSFSGLRAPVPASELLASGVLSRAQFEQLKDGKTTVKDLSELGSVRTLLQGSGCLAGIYLEDTKEKVSIYEAMRRGLLRATTAALLLEAQAATGFLVDPVRNQRLYVHEAVKAGVVGPELHEQLLSAEKAVTGYRDPYSGSTISLFQAMQKGLVLRQHGIRLLEAQIATGGIIDPVHSHRVPVDVAYQRGYFSEEMNRVLADPSDDTKGFFDPNTHENLTYRQLLERCVEDPETGLRLLPLKGAEKAEVVETTQVYTEEETRRAFEETQIDIPGGGSHGGSTMSLWEVMQSDLIPEEQRAQLMADFQAGRVTKERMIIIIIEIIEKTEIIRQQGLASYDYVRRRLTAEDLFEARIISLETYNLLREGTRSLREALEAESAWCYLYGTGSVAGVYLPGSRQTLSIYQALKKGLLSAEVARLLLEAQAATGFLLDPVKGERLTVDEAVRKGLVGPELHDRLLSAERAVTGYRDPYTEQTISLFQAMKKELIPTEEALRLLDAQLATGGIVDPRLGFHLPLEVAYQRGYLNKDTHDQLSEPSEVRSYVDPSTDERLSYTQLLRRCRRDDGTGQLLLPLSDARKLTFRGLRKQITMEELVRSQVMDEATALQLREGLTSIEEVTKNLQKFLEGTSCIAGVFVDATKERLSVYQAMKKGIIRPGTAFELLEAQAATGYVIDPIKGLKLTVEEAVRMGIVGPEFKDKLLSAERAVTGYKDPYSGKLISLFQAMKKGLILKDHGIRLLEAQIATGGIIDPEESHRLPVEVAYKRGLFDEEMNEILTDPSDDTKGFFDPNTEENLTYLQLMERCITDPQTGLCLLPLKEKKRERKTSSKSSVRKRRVVIVDPETGKEMSVYEAYRKGLIDHQTYLELSEQECEWEEITISSSDGVVKSMIIDRRSGRQYDIDDAIAKNLIDRSALDQYRAGTLSITEFADMLSGNAGGFRSRSSSVGSSSSYPISPAVSRTQLASWSDPTEETGPVAGILDTETLEKVSITEAMHRNLVDNITGQRLLEAQACTGGIIDPSTGERFPVTDAVNKGLVDKIMVDRINLAQKAFCGFEDPRTKTKMSAAQALKKGWLYYEAGQRFLEVQYLTGGLIEPDTPGRVPLDEALQRGTVDARTAQKLRDVGAYSKYLTCPKTKLKISYKDALDRSMVEEGTGLRLLEAAAQSTKGYYSPYSVSGSGSTAGSRTGSRTGSRAGSRRGSFDATGSGFSMTFSSSSYSSSGYGRRYASGSSASLGGPESAVA

SEQ ID NO: 196 - protein, 4074 aa, homo sapiens
MTAWLISLMSIEVLLLAVRHLSLHIEPEEGSLAGGTWITVIFDGLELGVLYPNNGSQLEIHLVNVNMVVPALRSVPCDVFPVFLDLPVVTCRTRSVLSEAHEGLYFLEAYFGGQLVSSPNPGPRDSCTFKFSKAQTPIVHQVYPPSGVPGKLIHVYGWIITGRLETFDFDAEYIDSPVILEAQGDKWVTPCSLINRQMGSCYPIQEDHGLGTLQCHVEGDYIGSQNVSFSVFNKGKSMVHKKAWLISAKQDLFLYQTHSEILSVFPETGSLGGRTNITITGDFFDNSAQVTIAGIPCDIRHVSPRKIECTTRAPGKDVRLTTPQPGNRGLLFEVGDAVEGLELTEATPGYRWQIVPNASSPFGFWSQEGQPFRARLSGFFVAPETNNYTFWIQADSQASLHFSWSEEPRTKVKVASISVGTADWFDSWEQNRDEGTWQQKTPKLELLGGAMYYLEAEHHGIAPSRGMRIGVQIHNTWLNPDVVTTYLREKHQIRVRAQRLPEVQVLNVSGRGNFFLTWDNVSSQPIPANATAHLIQTTIEELLAVKCKLEPLWSNILLRLGFERGPEVSNSDGDLTSGTEPFCGRFSLRQPRHLVLTPPAAQKGYRLDQYTHLCLAYKGHMNKILKMIVSFTIGFQNMVKNTTCDWSLTRTSPESWQFDCTDLWETCVRCFGDLQPPPANSPVLVHQINLLPLAQETGLFYVDEIIIADTNVTVSQADSGTARPGGNLVESVSVVGSPPVYSVTSWLAGCGTELPLITARSVPTEGTEEGSGLVLVTTQRRQRTSPPLGGHFRIQLPNTVISDVPVQISAHHLHQLLQNNADDFTSRYLNASDFTVKEDLYTCYEHVWTLSWSTQIGDLPNFIRVSDENLTGVNPAAATRVVYDGGVFLGPIFGDMLATANQHTQVVVRVNDVPAHCPGSCSFQYLQGSTPCVHSVWYSIDGDINLMIYITGTGFSGDSQFLQVTVNKTSCKVIFSNQTNVVCQTDLLPVGMHRILMLVRPSGLAISATGEDLFLNVKPRLDMVEPSRAADIGGLWATIRGSSLEGVSLILFGSYSCAINVATSNSSRIQCKVPPRGKDGRIVNVTVIRGDYSAVLPRAFTYVSSLNPVIVTLSRNISNIAGGETLVIGVARLMNYTDLDVEVHVQDALAPVHTQSAWGLEVALPPLPAGLHRISVSINGVSIHSQGVDLHIQYLTEVFSIEPCCGSLLGGTILSISGIGFSRDPALVWVLVGNRSCDIVNLTEASIWCETLPAPQIPDAGAPTVPAAVEVWAGNRFFARGPSPSLVGKGFTFMYEAAATPVVTAMQGEITNSSLSLHVGGSNLSNSVILLGNLNCDVETQSFQGNVSLSGCSIPLHSLEAGIYPLQVRQKQMGFANMSVVLQQFAVMPRIMAIFPSQGSACGGTILTVRGLLLNSRRRSVRVDLSGPFTCVILSLGDHTILCQVSLEGDPLPGASFSLNVTVLVNGLTSECQGNCTLFIREEASPVMDALSTNTSGSLTTVLIRGQRLATTADEPMVFVDDQLPCNVTFFNASHVVCQTRDLAPGPHYLSVFYTRNGYACSGNVSRHFYIMPQVFHYFPKNFSLHGGSLLTIEGTGLRGQNTTSVYIDQQTCLTVNIGAELIRCIVPTGNGSVALEIEVDGLWYHIGVIGYNKAFTPELISISQSDDILTFAVAQISGAANIDIFIGMSPCVGVSGNHTVLQCVVPSLPAGEYHVRGYDCIRGWASSALVFTSRVIITAVTENFGCLGGRLVHVFGAGFSPGNVSAAVCGAPCRVLANATVSAFSCLVLPLDVSLAFLCGLKREEDSCEAARHTYVQCDLTVAMATEQLLESWPYLYICEESSQCLFVPDHWAESMFPSFSGLFISPKLERDEVLIYNSSCNITMETEAEMECETPNQPITVKITEIRKRWGQNTQGNFSLQFCRRWSRTHSWFPERLPQDGDNVTVENGQLLLLDTNTSILNLLHIKGGKLIFMAPGPIELRAHAILVSDGGELRIGSEDKPFQGRAQITLYGSSYSTPFFPYGVKFLAVRNGTLSLHGSLPEVIVTCLRATAHALDTVLALEDAVDWNPGDEVVIISGTGVKGAKPMEEIVTVETVQDTDLYLKSPLRYSHNFTENWVAGEHHILKATVALLSRSITIQGNLTNEREKLLVSCQEANAPEGNLQHCLYSMSEKMLGSRDMGARVIVQSFPEEPSQVQLKGVQFQVLGQAFHKHLSSLTLVGAMRESFIQGCTVRNSFSRGLSMCGTLGLKVDSNVFYNILGHALLVGTCTEMRYISWEAIHGRKDDWSGHGNIIRNNVIIQVSGAEGLSNPEMLTPSGIYICSPTNVIEGNRVCGAGYGYFFHLMTNQTSQAPLLSFTQNIAHSCTRYGLFVYPKFQPPWDNVTGTTLFQSFTVWESAGGAQIFRSSNLRLKNFKVYSCRDFGIDVLESDANTSVTDSLLLGHFAHKGSLCMSSGIKTPKRWELMVSNTTFVNFDLINCVAIRTCSDCSQGQGGFTVKTSQLKFTNSSNLVAFPFPHAAILEDLDGSLSGKNRSHILASMETLSASCLVNSSFGRVVHGSACGGGVLFHRMSIGLANTPEVSYDLTMTDSRNKTTTVNYVRDTLSNPRGWMALLLDQETYSLQSENLWINRSLQYSATFDNFAPGNYLLLVHTDLPPYPDILLRCGSRVGLSFPFLPSPGQNQGCDWFFNSQLRQLTYLVSGEGQVQVILRVKEGMPPTISASTSAPESALKWSLPETWQGVEEGWGGYNNTIPGPGDDVLILPNRTVLVDTDLPFFKGLYVMGTLDFPVDRSNVLSVACMVIAGGELKVGTLENPLEKEQKLLILLRASEGVFCDRMNGIHIDPGTIGVYGKVHLYSAYPKNSWTHLGADIASGNERIIVEDAVDWRPHDKIVLSSSSYEPHEAEVLTVKEVKGHHVRIYERLKHRHIGSVHVTEDGRHIRLAAEVGLLTRNIQIQPDVSCRGRLFVGSFRKSSREEFSGVLQLLNVEIQNFGSPLYSSVEFSNVSAGSWIISSTLHQSCGGGIHAAASHGVLLNDNIVFGTAGHGIDLEGQAYTVTNNLVVLMTQPAWSTIWVAGIKVNQVKDINLHGNVVAGSERLGFHIRGHKCSSCELLWSDNVAHSSLHGLHLYKESGLDNCTRISGFLAFKNFDYGAMLHVENSVEIENITLVDNTIGLLAVVYVFSAPQNSVKKVQIVLRNSVIVATSSSFDCIQDKVKPHSANLTSTDRAPSNPRGGRIGILWPVFTSEPNQWPQEPWHKVRNDHSISGIMKLQDVTFSSFVKSCYSDDLDVCILPNAENSGIMHPITAERTRMLKIKDKNKFYFPSLQPRKDLGKVVCPELDCASPRKYLFKDLDGRALGLPPPVSVFPKTEAEWTASFFNAGTFREEQKCTYQFLMQGFICKQTDQVVLILDSADAIWAIQKLYPVVSVTSGFVDVFSSVNANIPCSTSGSVSTFYSILPIRQITKVCFMDQTPQVLRFFLLGNKSTSKLLLAVFYHELQSPHVFLGESFIPPTLVQSASLLLNESIGANYFNIMDNLLYVVLQGEEPIEIRSGVSIHLALTVMVSVLEKGWEIVILERLTNFLQIGQNQIRFIHEMPGHEETLKAIADSRAKRKRNCPTVTCTSHYRRVGQRRPLMMEMNSHRASPPMTVETISKVIVIEIGDSPTVRSTGMISSLSSNKLQNLAHRVITAQQTGVLENVLNMTIGALLVTQSKGVIGYGNTSSFKTGNLIYIRPYALSILVQPSDGEVGNELPVQPQLVFLDEQNRRVESLGPPSEPWTISASLEGASDSVLKGCTQAETQDGYVSFYNLAVLISGSNWHFIFTVTSPPGVNFTARSKPFAVLPVTRKEKSTIILAASLSSVASWLALSCLVCCWLKRSKSRKTKPEEIPESQTNNQNIHIHISSKRRESQGPKKEDTVVGEDMRMKVMLGKVNQCPHQLMNGVSRRKVSRHIVREEEAAVPAPGTTGITSHGHICAPGAPAQQVYLQETGNWKEGQEQLLRYQLAGQNQLLLLCPDFRQERQQLPGQSRLSKQSGSLGLSQEKKASCGATEAFCLHSVHPETIQEQL

SEQ ID NO: 197 - protein, 254 aa, homo sapiens
MASLLKVDQEVKLKVDSFRERITSEAEDLVANFFPKKLLELDSFLKEPILNIHDLTQIHSDMNLPVPDPILLTNSHDGLDGPTYKKRRLDECEEAFQGTKVFVMPNGMLKSNQQLVDIIEKVKPEIRLLIEKCNTVKMWVQLLIPRIEDGNNFGVSIQEETVAELRTVESEAASYLDQISRYYITRAKLVSKIAKYPHVEDYRRTVTEIDEKEYISLRLIISELRNQYVTLHDMILKNIEKIKRPRSSNAETLY

SEQ ID NO: 198 - protein, 977 aa, homo sapiens
MPARRLLLLLTLLLPGLGIFGSTSTVTLPETLLFVSTLDGSLHAVSKRTGSIKWTLKEDPVLQVPTHVEEPAFLPDPNDGSLYTLGSKNNEGLTKLPFTIPELVQASPCRSSDGILYMGKKQDIWYVIDLLTGEKQQTLSSAFADSLCPSTSLLYLGRTEYTITMYDTKTRELRWNATYFDYAASLPEDEGDYKMSHFVSNGDGLVVTVDSESGDVLWIQNYASPVVAFYVWQREGLRKVMHINVAVETLRYLTFMSGEVGRITKWKYPFPKETEAKSKLTPTLYVGKYSTSLYASPSMVHEGVAVVPRGSTLPLLEGPQTDGVTIGDKGECVITPSTDVKFDPGLKSKNKLNYLRNYWLLIGHHETPLSASTKMLERFPNNLPKHRENVIPADSEKKSFEEVINLVDQTSENAPTTVSRDVEEKPAHAPARPEAPVDSMLKDMATIILSTFLLIGWVAFIITYPLSMHQQQQLQHQQFQKELEKIQLLQQQQQQLPFHPPGDTAQDGELLDTSGPYSESSGTSSPSTSPRASNHSLCSGSSASKAGSSPSLEQDDGDEETSVVIVGKISFCPKDVLGHGAEGTIVYRGMFDNRDVAVKRILPECFSFADREVQLLRESDEHPNVIRYFCTEKDRQFQYIAIELCAATLQEYVEQKDFAHLGLEPITLLQQTTSGLAHLHSLNIVHRDLKPHNILISMPNAHGKIKAMISDFGLCKKLAVGRHSFSRRSGVPGTEGWIAPEMLSEDCKENPTYTVDIFSAGCVFYYVVSEGSHPFGKSLQRQANILLGACSLDCLHPEKHEDVIARELIEKMIAMDPQKRPSANDVLKHPFFWSLEKQLQFFQDVSDRIEKESLDGPIVKQLERGGRAVVKMDWRENITDPLQTDLRKFRTYKGGSVRDLLRAMRNKKHHYRELPAEVRETLGTLPDDFVCYFTSRFPHLLAHTYRAMELCSHERLFQPYYFHEPPEPQPPVTPDAL

SEQ ID NO: 199 - protein, 1222 aa, homo sapiens
MLVGQGAGPLGPAVVTAAVVLLLSGVGPAHGSEDIVVGCGGFVKSDVEINYSLIEIKLYTKHGTLKYQTDCAPNNGYFMIPLYDKGDFILKIEPPLGWSFEPTTVELHVDGVSDICTKGGDINFVFTGFSVNGKVLSKGQPLGPAGVQVSLRNTGTEAKIQSTVTQPGGKFAFFKVLPGDYEILATHPTWALKEASTTVRVTNSNANAASPLIVAGYNVSGSVRSDGEPMKGVKFLLFSSLVTKEDVLGCNVSPVPGFQPQDESLVYLCYTVSREDGSFSFYSLPSGGYTVIPFYRGERITFDVAPSRLDFTVEHDSLKIEPVFHVMGFSVTGRVLNGPEGDGVPEAVVTLNNQIKVKTKADGSFRLENITTGTYTIHAQKEHLYFETVTIKIAPNTPQLADIIATGFSVCGQISIIRFPDTVKQMNKYKVVLSSQDKDKSLVTVETDAHGSFCFKAKPGTYKVQVMVPEAETRAGLTLKPQTFPLTVTNRPMMDVAFVQFLASVSGKVSCLDTCGDLLVTLQSLSRQGEKRSLQLSGKVNAMTFTFDNVLPGKYKISIMHEDWCWKNKSLEVEVLEDDMSAVEFRQTGYMLRCSLSHAITLEFYQDGNGRENVGIYNLSKGVNRFCLSKPGVYKVTPRSCHRFEQAFYTYDTSSPSILTLTAIRHHVLGTITTDKMMDVTVTIKSSIDSEPALVLGPLKSVQELRREQQLAEIEARRQEREKNGNEEGEERMTKPPVQEMVDELQGPFSYDFSYWARSGEKITVTPSSKELLFYPPSMEAVVSGESCPGKLIEIHGKAGLFLEGQIHPELEGVEIVISEKGASSPLITVFTDDKGAYSVGPLHSDLEYTVTSQKEGYVLTAVEGTIGDFKAYALAGVSFEIKAEDDQPLPGVLLSLSGGLFRSNLLTQDNGILTFSNLSPGQYYFKPMMKEFRFEPSSQMIEVQEGQNLKITITGYRTAYSCYGTVSSLNGEPEQGVAMEAVGQNDCSIYGEDTVTDEEGKFRLRGLLPGCVYHVQLKAEGNDHIERALPHHRVIEVGNNDIDDVNIIVFRQINQFDLSGNVITSSEYLPTLWVKLYKSENLDNPIQTVSLGQSLFFHFPPLLRDGENYVVLLDSTLPRSQYDYILPQVSFTAVGYHKHITLIFNPTRKLPEQDIAQGSYIALPLTLLVLLAGYNHDKLIPLLLQLTSRLQGVRVLGQAASDNSGPEDAKRQAKKQKTRRT

SEQ ID NO: 200 - protein, 767 aa, homo sapiens
MATYLEFIQQNEERDGVRFSWNVWPSSRLEATRMVVPLACLLTPLKERPDLPPVQYEPVLCSRPTCKAVLNPLCQVDYRAKLWACNFCFQRNQFPPAYGGISEVNQPAELMPQFSTIEYVIQRGAQSPLIFLYVVDTCLEEDDLQALKESLQMSLSLLPPDALVGLITFGRMVQVHELSCEGISKSYVFRGTKDLTAKQIQDMLGLTKPAMPMQQARPAQPQEHPFASSRFLQPVHKIDMNLTDLLGELQRDPWPVTQGKRPLRSTGVALSIAVGLLEGTFPNTGARIMLFTGGPPTQGPGMVVGDELKIPIRSWHDIEKDNARFMKKATKHYEMLANRTAANGHCIDIYACALDQTGLLEMKCCANLTGGYMVMGDSFNTSLFKQTFQRIFTKDFNGDFRMAFGATLDVKTSRELKIAGAIGPCVSLNVKGPCVSENELGVGGTSQWKICGLDPTSTLGIYFEVVNQHNTPIPQGGRGAIQFVTHYQHSSTQRRIRVTTIARNWADVQSQLRHIEAAFDQEAAAVLMARLGVFRAESEEGPDVLRWLDRQLIRLCQKFGQYNKEDPTSFRLSDSFSLYPQFMFHLRRSPFLQVFNNSPDESSYYRHHFARQDLTQSLIMIQPILYSYSFHGPPEPVLLDSSSILADRILLMDTFFQIVIYLGETIAQWRKAGYQDMPEYENFKHLLQAPLDDAQEILQARFPMPRYINTEHGGSQARFLLSKVNPSQTHNNLYAWGQETGAPILTDDVSLQVFMDHLKKLAVSSAC

SEQ ID NO: 201 - protein, 476 aa, homo sapiens
MAIKFLEVIKPFCVILPEIQKPERKIQFKEKVLWTAITLFIFLVCCQIPLFGIMSSDSADPFYWMRVILASNRGTLMELGISPIVTSGLIMQLLAGAKIIEVGDTPKDRALFNGAQKLFGMIITIGQSIVYVMTGMYGDPSEMGAGICLLITIQLFVAGLIVLLLDELLQKGYGLGSGISLFIATNICETIVWKAFSPTTVNTGRGMEFEGAIIALFHLLATRTDKVRALREAFYRQNLPNLMNLIATIFVFAVVIYFQGFRVDLPIKSARYRGQYNTYPIKLFYTSNIPIILQSALVSNLYVISQMLSARFSGNLLVSLLGTWSDTSSGGPARAYPVGGLCYYLSPPESFGSVLEDPVHAVVYIVFMLGSCAFFSKTWIEVSGSSAKDVAKQLKEQQMVMRGHRETSMVHELNRYIPTAAAFGGLCIGALSVLADFLGAIGSGTGILLAVTIIYQYFEIFVKEQSEVGSMGALLF

SEQ ID NO: 202 - protein, 687 aa, homo sapiens
MAEELVLERCDLELETNGRDHHTADLCREKLVVRRGQPFWLTLHFEGRNYEASVDSLTFSVVTGPAPSQEAGTKARFPLRDAVEEGDWTATVVDQQDCTLSLQLTTPANAPIGLYRLSLEASTGYQGSSFVLGHFILLFNAWCPADAVYLDSEEERQEYVLTQQGFIYQGSAKFIKNIPWNFGQFEDGILDICLILLDVNPKFLKNAGRDCSRRSSPVYVGRVVSGMVNCNDDQGVLLGRWDNNYGDGVSPMSWIGSVDILRRWKNHGCQRVKYGQCWVFAAVACTVLRCLGIPTRVVTNYNSAHDQNSNLLIEYFRNEFGEIQGDKSEMIWNFHCWVESWMTRPDLQPGYEGWQALDPTPQEKSEGTYCCGPVPVRAIKEGDLSTKYDAPFVFAEVNADVVDWIQQDDGSVHKSINRSLIVGLKISTKSVGRDEREDITHTYKYPEGSSEEREAFTRANHLNKLAEKEETGMAMRIRVGQSMNMGSDFDVFAHITNNTAEEYVCRLLLCARTVSYNGILGPECGTKYLLNLNLEPFSEKSVPLCILYEKYRDCLTESNLIKVRALLVEPVINSYLLAERDLYLENPEIKIRILGEPKQKRKLVAEVSLQNPLPVALEGCTFTVEGAGLTEEQKTVEIPDPVEAGEEVKVRMDLLPLHMGLHKLVVNFESDKLKAVKGFRNVIIGPA

SEQ ID NO: 203 - protein, 2347 aa, homo sapiens
MKNIYCLIPKLVNFATLGCLWISVVQCTVLNSCLKSCVTNLGQQLDLGTPHNLSEPCIQGCHFWNSVDQKNCALKCRESCEVGCSSAEGAYEEEVLENADLPTAPFASSIGSHNMTLRWKSANFSGVKYIIQWKYAQLLGSWTYTKTVSRPSYVVKPLHPFTEYIFRVVWIFTAQLQLYSPPSPSYRTHPHGVPETAPLIRNIESSSPDTVEVSWDPPQFPGGPILGYNLRLISKNQKLDAGTQRTSFQFYSTLPNTIYRFSIAAVNEVGEGPEAESSITTSSSAVQQEEQWLFLSRKTSLRKRSLKHLVDEAHCLRLDAIYHNITGISVDVHQQIVYFSEGTLIWAKKAANMSDVSDLRIFYRGSGLISSISIDWLYQRMYFIMDELVCVCDLENCSNIEEITPPSISAPQKIVADSYNGYVFYLLRDGIYRADLPVPSGRCAEAVRIVESCTLKDFAIKPQAKRIIYFNDTAQVFMSTFLDGSASHLILPRIPFADVKSFACENNDFLVTDGKVIFQQDALSFNEFIVGCDLSHIEEFGFGNLVIFGSSSQLHPLPGRPQELSVLFGSHQALVQWKPPALAIGANVILISDIIELFELGPSAWQNWTYEVKVSTQDPPEVTHIFLNISGTMLNVPELQSAMKYKVSVRASSPKRPGPWSEPSVGTTLVPASEPPFIMAVKEDGLWSKPLNSFGPGEFLSSDIGNVSDMDWYNNSLYYSDTKGDVFVWLLNGTDISENYHLPSIAGAGALAFEWLGHFLYWAGKTYVIQRQSVLTGHTDIVTHVKLLVNDMVVDSVGGYLYWTTLYSVESTRLNGESSLVLQTQPWFSGKKVIALTLDLSDGLLYWLVQDSQCIHLYTAVLRGQSTGDTTITEFAAWSTSEISQNALMYYSGRLFWINGFRIITTQEIGQKTSVSVLEPARFNQFTIIQTSLKPLPGNFSFTPKVIPDSVQESSFRIEGNASSFQILWNGPPAVDWGVVFYSVEFSAHSKFLASEQHSLPVFTVEGLEPYALFNLSVTPYTYWGKGPKTSLSLRAPETVPSAPENPRIFILPSGKCCNKNEVVVEFRWNKPKHENGVLTKFEIFYNISNQSITNKTCEDWIAVNVTPSVMSFQLEGMSPRCFIAFQVRAFTSKGPGPYADVVKSTTSEINPFPHLITLLGNKIVFLDMDQNQVVWTFSAERVISAVCYTADNEMGYYAEGDSLFLLHLHNRSSSELFQDSLVFDITVITIDWISRHLYFALKESQNGMQVFDVDLEHKVKYPREVKIHNRNSTIISFSVYPLLSRLYWTEVSNFGYQMFYYSIISHTLHRILQPTATNQQNKRNQCSCNVTEFELSGAMAIDTSNLEKPLIYFAKAQEIWAMDLEGCQCWRVITVPAMLAGKTLVSLTVDGDLIYWIITAKDSTQIYQAKKGNGAIVSQVKALRSRHILAYSSVMQPFPDKAFLSLASDTVEPTILNATNTSLTIRLPLAKTNLTWYGITSPTPTYLVYYAEVNDRKNSSDLKYRILEFQDSIALIEDLQPFSTYMIQIAVKNYYSDPLEHLPPGKEIWGKTKNGVPEAVQLINTTVRSDTSLIISWRESHKPNGPKESVRYQLAISHLALIPETPLRQSEFPNGRLTLLVTRLSGGNIYVLKVLACHSEEMWCTESHPVTVEMFNTPEKPYSLVPENTSLQFNWKAPLNVNLIRFWVELQKWKYNEFYHVKTSCSQGPAYVCNITNLQPYTSYNVRVVVVYKTGENSTSLPESFKTKAGVPNKPGIPKLLEGSKNSIQWEKAEDNGCRITYYILEIRKSTSNNLQNQNLRWKMTFNGSCSSVCTWKSKNLKGIFQFRVVAANNLGFGEYSGISENIILVGDDFWIPETSFILTIIVGIFLVVTIPLTFVWHRRLKNQKSAKEGVTVLINEDKELAELRGLAAGVGLANACYAIHTLPTQEEIENLPAFPREKLTLRLLLGSGAFGEVYEGTAVDILGVGSGEIKVAVKTLKKGSTDQEKIEFLKEAHLMSKFNHPNILKQLGVCLLNEPQYIILELMEGGDLLTYLRKARMATFYGPLLTLVDLVDLCVDISKGCVYLERMHFIHRDLAARNCLVSVKDYTSPRIVKIGDFGLARDIYKNDYYRKRGEGLLPVRWMAPESLMDGIFTTQSDVWSFGILIWEILTLGHQPYPAHSNLDVLNYVQTGGRLEPPRNCPDDLWNLMTQCWAQEPDQRPTFHRIQDQLQLFRNFFLNSIYKSRDEANNSGVINESFEGEDGDVICLNSDDIMPVALMETKNREGLNYMVLATECGQGEEKSEGPLGSQESESCGLRKEEKEPHADKDFCQEKQVAYCPSGKPEGLNYACLTHSGYGDGSD

SEQ ID NO: 204 - protein, 543 aa, homo sapiens
MGCIKSKENKSPAIKYRPENTPEPVSTSVSHYGAEPTTVSPCPSSSAKGTAVNFSSLSMTPFGGSSGVTPFGGASSSFSVVPSSYPAGLTGGVTIFVALYDYEARTTEDLSFKKGERFQIINNTEGDWWEARSIATGKNGYIPSNYVAPADSIQAEEWYFGKMGRKDAERLLLNPGNQRGIFLVRESETTKGAYSLSIRDWDEIRGDNVKHYKIRKLDNGGYYITTRAQFDTLQKLVKHYTEHADGLCHKLTTVCPTVKPQTQGLAKDAWEIPRESLRLEVKLGQGCFGEVWMGTWNGTTKVAIKTLKPGTMMPEAFLQEAQIMKKLRHDKLVPLYAVVSEEPIYIVTEFMSKGSLLDFLKEGDGKYLKLPQLVDMAAQIADGMAYIERMNYIHRDLRAANILVGENLVCKIADFGLARLIEDNEYTARQGAKFPIKWTAPEAALYGRFTIKSDVWSFGILQTELVTKGRVPYPGMVNREVLEQVERGYRMPCPQGCPESLHELMNLCWKKDPDERPTFEYIQSFLEDYFTATEPQYQPGENL

SEQ ID NO: 205 - protein, 1657 aa, homo sapiens
MSAADEVDGLGVARPHYGSVLDNERLTAEEMDERRRQNVAYEYLCHLEEAKRWMEACLGEDLPPTTELEEGLRNGVYLAKLGNFFSPKVVSLKKIYDREQTRYKATGLHFRHTDNVIQWLNAMDEIGLPKIFYPETTDIYDRKNMPRCIYCIHALSLYLFKLGLAPQIQDLYGKVDFTEEEINNMKTELEKYGIQMPAFSKIGGILANELSVDEAALHAAVIAINEAIDRRIPADTFAALKNPNAMLVNLEEPLASTYQDILYQAKQDKMTNAKNRTENSERERDVYEELLTQAEIQGNINKVNTFSALANIDLALEQGDALALFRALQSPALGLRGLQQQNSDWYLKQLLSDKQQKRQSGQTDPLQKEELQSGVDAANSAAQQYQRRLAAVALINAAIQKGVAEKTVLELMNPEAQLPQVYPFAADLYQKELATLQRQSPEHNLTHPELSVAVEMLSSVALINRALESGDVNTVWKQLSSSVTGLTNIEEENCQRYLDELMKLKAQAHAENNEFITWNDIQACVDHVNLVVQEEHERILAIGLINEALDEGDAQKTLQALQIPAAKLEGVLAEVAQHYQDTLIRAKREKAQEIQDESAVLWLDEIQGGIWQSNKDTQEAQKFALGIFAINEAVESGDVGKTLSALRSPDVGLYGVIPECGETYHSDLAEAKKKKLAVGDNNSKWVKHWVKGGYYYYHNLETQEGGWDEPPNFVQNSMQLSREEIQSSISGVTAAYNREQLWLANEGLITRLQARCRGYLVRQEFRSRMNFLKKQIPAITCIQSQWRGYKQKKAYQDRLAYLRSHKDEVVKIQSLARMHQARKRYRDRLQYFRDHINDIIKIQAFIRANKARDDYKTLINAEDPPMVVVRKFVHLLDQSDQDFQEELDLMKMREEVITLIRSNQQLENDLNLMDIKIGLLVKNKITLQDVVSHSKKLTKKNKEQLSDMMMINKQKGGLKALSKEKREKLEAYQHLFYLLQTNPTYLAKLIFQMPQNKSTKFMDSVIFTLYNYASNQREEYLLLRLFKTALQEEIKSKVDQIQEIVTGNPTVIKMVVSFNRGARGQNALRQILAPVVKEIMDDKSLNIKTDPVDIYKSWVNQMESQTGEASKLPYDVTPEQALAHEEVKTRLDSSIRNMRAVTDKFLSAIVSSVDKIPYGMRFIAKVLKDSLHEKFPDAGEDELLKIIGNLLYYRYMNPAIVAPDAFDIIDLSAGGQLTTDQRRNLGSIAKMLQHAASNKMFLGDNAHLSIINEYLSQSYQKFRRFFQTACDVPELQDKFNVDEYSDLVTLTKPVIYISIGEIINTHTLLLDHQDAIAPEHNDPIHELLDDLGEVPTIESLIGESSGNLNDPNKEALAKTEVSLTLTNKFDVPGDENAEMDARTILLNTKRLIVDVIRFQPGETLTEILETPATSEQEAEHQRAMQRRAIRDAKTPDKMKKSKSVKEDSNLTLQEKKEKIQTGLKKLTELGTVDPKNKYQELINDIARDIRNQRRYRQRRKAELVKLQQTYAALNSKATFYGEQVDYYKSYIKTCLDNLASKGKVSKKPREMKGKKSKKISLKYTAARLHEKGVLLEIEDLQVNQFKNVIFEISPTEEVGDFEVKAKFMGVQMETFMLHYQDLLQLQYEGVAVMKLFDRAKVNVNLLIFLLNKKFYGK

SEQ ID NO: 206 - protein, 1575 aa, homo sapiens
MPHEELPSLQRPRYGSIVDDERLSAEEMDERRRQNIAYEYLCHLEEAKRWMEVCLVEELPPTTELEEGLRNGVYLAKLAKFFAPKMVSEKKIYDVEQTRYKKSGLHFRHTDNTVQWLRAMESIGLPKIFYPETTDVYDRKNIPRMIYCIHALSLYLFKLGIAPQIQDLLGKVDFTEEEISNMRKELEKYGIQMPSFSKIGGILANELSVDEAALHAAVIAINEAVEKGIAEQTVVTLRNPNAVLTLVDDNLAPEYQKELWDAKKKKEENARLKNSCISEEERDAYEELLTQAEIQGNINKVNRQAAVDHINAVIPEGDPENTLLALKKPEAQLPAVYPFAAAMYQNELFNLQKQNTMNYLAHEELLIAVEMLSAVALLNQALESNDLVSVQNQLRSPAIGLNNLDKAYVERYANTLLSVKLEVLSQGQDNLSWNEIQNCIDMVNAQIQEENDRVVAVGYINEAIDEGNPLRTLETLLLPTANISDVDPAHAQHYQDVLYHAKSQKLGDSESVSKVLWLDEIQQAVDEANVDEDRAKQWVTLVVDVNQCLEGKKSSDILSVLKSSTSNANDIIPECADKYYDALVKAKELKSERVSSDGSWLKLNLHKKYDYYYNTDSKESSWVTPESCFYKESWLTGKEIEDIIEEVTVGYIRENIWSASEELLLRFQATSSGPILREEFEARKSFLHEQEENVVKIQAFWKGYKQRKEYMHRRQTFIDNTDSVVKIQSWFRMATARKSYLSRLQYFRDHNNEIVKIQSLLRANKARDDYKTLVGSENPPLTVIRKFVYLLDQSDLDFQEELEVARLREEVVTKIRANQQLEKDLNLMDIKIGLLVKNRITLEDVISHSKKLNKKKGGEMEILNNTDNQGIKSLSKERRKTLETYQQLFYLLQTNPLYLAKLIFQMPQNKSTKFMDTVIFTLYNYASNQREEYLLLKLFKTALEEEIKSKVDQVQDIVTGNPTVIKMVVSFNRGARGQNTLRQLLAPVVKEIIDDKSLIINTNPVEVYKAWVNQLETQTGEASKLPYDVTTEQALTYPEVKNKLEASIENLRRVTDKVLNSIISSLDLLPYGLRYIAKVLKNSIHEKFPDATEDELLKIVGNLLYYRYMNPAIVAPDGFDIIDMTAGGQINSDQRRNLGSVAKVLQHAASNKLFEGENEHLSSMNNYLSETYQEFRKYFKEACNVPEPEEKFNMDKYTDLVTVSKPVIYISIEEIISTHSLLLEHQDAIAPEKNDLLSELLGSLGEVPTVESFLGEGAVDPNDPNKANTLSQLSKTEISLVLTSKYDIEDGEAIDSRSLMIKTKKLIIDVIRNQPGNTLTEILETPATAQQEVDHATDMVSRAMIDSRTPEEMKHSQSMIEDAQLPLEQKKRKIQRNLRTLEQTGHVSSENKYQDILNEIAKDIRNQRIYRKLRKAELAKLQQTLNALNKKAAFYEEQINYYDTYIKTCLDNLKRKNTRRSIKLDGKGEPKGAKRAKPVKYTAAKLHEKGVLLDIDDLQTNQFKNVTFDIIATEDVGIFDVRSKFLGVEMEKVQLNIQDLLQMQYEGVAVMKMFDKVKVNVNLLIYLLNKKFYGK

SEQ ID NO: 207 - protein, 221 aa, homo sapiens
MSDGDYDYLIKFLALGDSGVGKTSVLYQYTDGKFNSKFITTVGIDFREKRVVYRASGPDGATGRGQRIHLQLWDTAGQERFRSLTTAFFRDAMGFLLLFDLTNEQSFLNVRNWISQLQMHAYCENPDIVLCGNKSDLEDQRVVKEEEAIALAEKYGIPYFETSAANGTNISQAIEMLLDLIMKRMERCVDKSWIPEGVVRSNGHASTDQLSEEKEKGACGC

SEQ ID NO: 208 - protein, 547 aa, homo sapiens
MFYYPNVLQRHTGCFATIWLAATRGSRLVKREYLRVNVVKTCEEILNYVLVRVQPPQPGLPRPRFSLYLSAQLQIGVIRVYSQQCQYLVEDIQHILERLHRAQLQIRIDMETELPSLLLPNHLAMMETLEDAPDPFFGMMSVDPRLPSPFDIPQIRHLLEAAIPERVEEIPPEVPTEPREPERIPVTVLPPEAITILEAEPIRMLEIEGERELPEVSRRELDLLIAEEEEAILLEIPRLPPPAPAEVEGIGEALGPEELRLTGWEPGALLMEVTPPEELRLPAPPSPERRPPVPPPPRRRRRRRLLFWDKETQISPEKFQEQLQTRAHCWECPMVQPPERTIRGPAELFRTPTLSGWLPPELLGLWTHCAQPPPKALRRELPEEAAAEEERRKIEVPSEIEVPREALEPSVPLMVSLEISLEAAEEEKSRISLIPPEERWAWPEVEAPEAPALPVVPELPEVPMEMPLVLPPELELLSLEAVHRAVALELQANREPDFSSLVSPLSPRRMAARVFYLLLVLSAQQILHVKQEKPYGRLLIQPGPRFH

SEQ ID NO: 209 - protein, 1692 aa, homo sapiens
MSSAVGPRGPRPPTVPPPMQELPDLSHLTEEERNIIMAVMDRQKEEEEKEEAMLKCVVRDMAKPAACKTPRNAENQPHQPSPRLHQQFESYKEQVRKIGEEARRYQGEHKDDAPTCGICHKTKFADGCGHLCSYCRTKFCARCGGRVSLRSNNEDKVVMWVCNLCRKQQEILTKSGAWFFGSGPQQTSQDGTLSDTATGAGSEVPREKKARLQERSRSQTPLSTAAASSQDAAPPSAPPDRSKGAEPSQQALGPEQKQASSRSRSEPPRERKKTPGLSEQNGKGALKSERKRVPKTSAQPVEGAVEERERKERRESRRLEKGRSQDYPDTPEKRDEGKAADEEKQRKEEDYQTRYRSDPNLARYPVKPPPEEQQMRMHARVSRARHERRHSDVALPRTEAGAALPEGKAGKRAPAAARASPPDSPRAYSAERTAETRAPGAKQLTNHSPPAPRHGPVPAEAPELKAQEPLRKQSRLDPSSAVLMRKAKREKVETMLRNDSLSSDQSESVRPSPPKPHRSKRGGKKRQMSVSSSEEEGVSTPEYTSCEDVELESESVSEKGDLDYYWLDPATWHSRETSPISSHPVTWQPSKEGDRLIGRVILNKRTTMPKDSGALLGLKVVGGKMTDLGRLGAFITKVKKGSLADVVGHLRAGDEVLEWNGKPLPGATNEEVYNIILESKSEPQVEIIVSRPIGDIPRIPESSHPPLESSSSSFESQKMERPSISVISPTSPGALKDAPQVLPGQLSVKLWYDKVGHQLIVNVLQATDLPARVDGRPRNPYVKMYFLPDRSDKSKRRTKTVKKILEPKWNQTFVYSHVHRRDFRERMLEITVWDQPRVQEEESEFLGEILIELETALLDDEPHWYKLQTHDESSLPLPQPSPFMPRRHIHGESSSKKLQRSQRISDSDISDYEVDDGIGVVPPVGYRSSARESKSTTLTVPEQQRTTHHRSRSVSPHRGNDQGKPRSRLPNVPLQRSLDEIHPTRRSRSPTRHHDASRSPVDHRTRDVDSQYLSEQDSELLMLPRAKRGRSAECLHTTRHLVRHYKTLPPKMPLLQSSSHWNIYSSILPAHTKTKSVTRQDISLHHECFNSTVLRFTDEILVSELQPFLDRARSASTNCLRPDTSLHSPERERGRWSPSLDRRRPPSPRIQIQHASPENDRHSRKSERSSIQKQTRKGTASDAERVLPTCLSRRGHAAPRATDQPVIRGKHPARSRSSEHSSIRTLCSMHHLVPGGSAPPSPLLTRMHRQRSPTQSPPADTSFSSRRGRQLPQVPVRSGSIEQASLVVEERTRQMKMKVHRFKQTTGSGSSQELDREQYSKYNIHKDQYRSCDNVSAKSSDSDVSDVSAISRTSSASRLSSTSFMSEQSERPRGRISSFTPKMQGRRMGTSGRSIMKSTSVSGEMYTLEHNDGSQSDTAVGTVGAGGKKRRSSLSAKVVAIVSRRSRSTSQLSQTESGHKKLKSTIQRSTETGMAAEMRKMVRQPSRESTDGSINSYSSEGNLIFPGVRLGADSQFSDFLDGLGPAQLVGRQTLATPAMGDIQIGMEDKKGQLEVEVIRARSLTQKPGSKSTPAPYVKVYLLENGACIAKKKTRIARKTLDPLYQQSLVFDESPQGKVLQVIVWGDYGRMDHKCFMGVAQILLEELDLSSMVIGWYKLFPPSSLVDPTLTPLTRRASQSSLESSTGPPCIRS

SEQ ID NO: 210 - protein, 1805 aa, homo sapiens
GGLLQTETTLGLSSYQQKSISLYRGNCRPIRFEPPMLDFHEQPVGMPKMEKVYLHNPSSEETITLVSISATTSHFHASFFQNRKILPGGNTSFDVVFLARVVGNVENTLFINTSNHGVFTYQVFGVGVPNPYRLRPFLGARVPVNSSFSPIINIHNPHSEPLQVVEMYSSGGDLHLELPTGQQGGTRKLWEIPPYETKGVMRASFSSREADNHTAFIRIKTNASDSTEFIILPVEVEVTTAPGIYSSTEMLDFGTLRTQDLPKVLNLHLLNSGTKDVPITSVRPTPQNDAITVHFKPITLKASESKYTKVASISFDASKAKKPSQFSGKITVKAKEKSYSKLEIPYQAEVLDGYLGFDHAATLFHIRDSPADPVERPIYLTNTFSFAILIHDVLLPEEAKTMFKVHNFSKPVLILPNESGYIFTLLFMPSTSSMHIDNNILLITNASKFHLPVRVYTGFLDYFVLPPKIEERFIDFGVLSATEASNILFAIINSNPIELAIKSWHIIGDGLSIELVAVERGNRTTIISSLPEFEKSSLSDQSSVTLASGYFAVFRVKLTAKKLEGIHDGAIQITTDYEILTIPVKAVIAVGSLTCFPKHVVLPPSFPGKIVHQSLNIMNSFSQKVKIQQIRSLSEDVRFYYKRLRGNKEDLEPGKKSKIANIYFDPGLQCGDHCYVGLPFLSKSEPKVQPGVAMQEDMWDADWDLHQSLFKGWTGIKENSGHRLSAIFEVNTDLQKNIISKITAELSWPSILSSPRHLKFPLTNTNCSSEEEITLENPADVPVYVQFIPLALYSNPSVFVDKLVSRFNLSKVAKIDLRTLEFQVFRNSAHPLQSSTGFMEGLSRHLILNLILKPGEKKSVKVKFTPVHNRTVSSLIIVRNNLTVMDAVMVQGQGTTENLRVAGKLPGPGSSLRFKITEALLKDCTDSLKLREPNFTLKRTFKVENTGQLQIHIETIEISGYSCEGYGFKVVNCQEFTLSANASRDIIILFTPDFTASRVIRELKFITTSGSEFVFILNASLPYHMLATCAEALPRPNWELALYIIISGIMSALFLLVIGTAYLEAQGIWEPFRRRLSFEASNPPFDVGRPFDLRRIVGISSEGNLNTLSCDPGHSRGFCGAGGSSSRPSAGSHKQCGPSVHPHSSHSNRNSADVENVRAKNSSSTSSRTSAQAASSQSANKTSPLVLDSNTVTQGHTAGRKSKGAKQSQHGSQHHAHSPLEQHPQPPLPPPVPQPQEPQPERLSPAPLAHPSHPERASSARHSSEDSDITSLIEAMDKDFDHHDSPALEVFTEQPPSPLPKSKGKGKPLQRKVKPPKKQEEKEKKGKGKPQEDELKDSLADDDSSSTTTETSNPDTEPLLKEDTEKQKGKQAMPEKHESEMSQVKQKSKKLLNIKKEIPTDVKPSSLELPYTPPLESKQRRNLPSKIPLPTAMTSGSKSRNAQKTKGTSKLVDNRPPALAKFLPNSQELGNTSSSEGEKDSPPPEWDSVPVHKPGSSTDSLYKLSLQTLNADIFLKQRQTSPTPASPSPPAAPCPFVARGSYSSIVNSSSSSDPKIKQPNGSKHKLTKAASLPGKNGNPTFAAVTAGYDKSPGGNGFAKVSSNKTGFSSSLGISHAPVDSDGSDSSGLWSPVSNPSSPDFTPLNSFSAFGNSFNLTGEVFSKLGLSRSCNQASQRSWNEFNSGPSYLWESPATDPSPSWPASSGSPTHTATSVLGNTSGLWSTTPFSSSIWSSNLSSALPFTTPANTLASIGLMGTENSPAPHAPSTSSPADDLGQTYNPWRIWSPTIGRRSSDPWSNSHFPHEN

SEQ ID NO: 211 - protein, 5038 aa, homo sapiens
MGDAEGEDEVQFLRTDDEVVLQCSATVLKEQLKLCLAAEGFGNRLCFLEPTSNAQNVPPDLAICCFVLEQSLSVRALQEMLANTVEAGVESSQGGGHRTLLYGHAILLRHAHSRMYLSCLTTSRSMTDKLAFDVGLQEDATGEACWWTMHPASKQRSEGEKVRVGDDIILVSVSSERYLHLSTASGELQVDASFMQTLWNMNPICSRCEEGFVTGGHVLRLFHGHMDECLTISPADSDDQRRLVYYEGGAVCTHARSLWRLEPLRISWSGSHLRWGQPLRVRHVTTGQYLALTEDQGLVVVDASKAHTKATSFCFRISKEKLDVAPKRDVEGMGPPEIKYGESLCFVQHVASGLWLTYAAPDPKALRLGVLKKKAMLHQEGHMDDALSLTRCQQEESQAARMIHSTNGLYNQFIKSLDSFSGKPRGSGPPAGTALPIEGVILSLQDLIIYFEPPSEDLQHEEKQSKLRSLRNRQSLFQEEGMLSMVLNCIDRLNVYTTAAHFAEFAGEEAAESWKEIVNLLYELLASLIRGNRSNCALFSTNLDWLVSKLDRLEASSGILEVLYCVLIESPEVLNIIQENHIKSIISLLDKHGRNHKVLDVLCSLCVCNGVAVRSNQDLITENLLPGRELLLQTNLINYVTSIRPNIFVGRAEGTTQYSKWYFEVMVDEVTPFLTAQATHLRVGWALTEGYTPYPGAGEGWGGNGVGDDLYSYGFDGLHLWTGHVARPVTSPGQHLLAPEDVISCCLDLSVPSISFRINGCPVQGVFESFNLDGLFFPVVSFSAGVKVRFLLGGRHGEFKFLPPPGYAPCHEAVLPRERLHLEPIKEYRREGPRGPHLVGPSRCLSHTDFVPCPVDTVQIVLPPHLERIREKLAENIHELWALTRIEQGWTYGPVRDDNKRLHPCLVDFHSLPEPERNYNLQMSGETLKTLLALGCHVGMADEKAEDNLKKTKLPKTYMMSNGYKPAPLDLSHVRLTPAQTTLVDRLAENGHNVWARDRVGQGWSYSAVQDIPARRNPRLVPYRLLDEATKRSNRDSLCQAVRTLLGYGYNIEPPDQEPSQVENQSRCDRVRIFRAEKSYTVQSGRWYFEFEAVTTGEMRVGWARPELRPDVELGADELAYVFNGHRGQRWHLGSEPFGRPWQPGDVVGCMIDLTENTIIFTLNGEVLMSDSGSETAFREIEIGDGFLPVCSLGPGQVGHLNLGQDVSSLRFFAICGLQEGFEPFAINMQRPVTTWFSKGLPQFEPVPLEHPHYEVSRVDGTVDTPPCLRLTHRTWGSQNSLVEMLFLRLSLPVQFHQHFRCTAGATPLAPPGLQPPAEDEARAAEPDPDYENLRRSAGGWSEAENGKEGTAKEGAPGGTPQAGGEAQPARAENEKDATTEKNKKRGFLFKAKKVAMMTQPPATPTLPRLPHDVVPADNRDDPEIILNTTTYYYSVRVFAGQEPSCVWAGWVTPDYHQHDMSFDLSKVRVVTVTMGDEQGNVHSSLKCSNCYMVWGGDFVSPGQQGRISHTDLVIGCLVDLATGLMTFTANGKESNTFFQVEPNTKLFPAVFVLPTHQNVIQFELGKQKNIMPLSAAMFQSERKNPAPQCPPRLEMQMLMPVSWSRMPNHFLQVETRRAGERLGWAVQCQEPLTMMALHIPEENRCMDILELSERLDLQRFHSHTLRLYRAVCALGNNRVAHALCSHVDQAQLLHALEDAHLPGPLRAGYYDLLISIHLESACRSRRSMLSEYIVPLTPETRAITLFPPGRSTENGHPRHGLPGVGVTTSLRPPHHFSPPCFVAALPAAGAAEAPARLSPAIPLEALRDKALRMLGEAVRDGGQHARDPVGGSVEFQFVPVLKLVSTLLVMGIFGDEDVKQILKMIEPEVFTEEEEEEDEEEEGEEEDEEEKEEDEEETAQEKEDEEKEEEEAAEGEKEEGLEEGLLQMKLPESVKLQMCHLLEYFCDQELQHRVESLAAFAERYVDKLQANQRSRYGLLIKAFSMTAAETARRTREFRSPPQEQINMLLQFKDGTDEEDCPLPEEIRQDLLDFHQDLLAHCGIQLDGEEEEPEEETTLGSRLMSLLEKVRLVKKKEEKPEEERSAEESKPRSLQELVSHMVVRWAQEDFVQSPELVRAMFSLLHRQYDGLGELLRALPRAYTISPSSVEDTMSLLECLGQIRSLLIVQMGPQEENLMIQSIGNIMNNKVFYQHPNLMRALGMHETVMEVMVNVLGGGESKEIRFPKMVTSCCRFLCYFCRISRQNQRSMFDHLSYLLENSGIGLGMQGSTPLDVAAASVIDNNELALALQEQDLEKVVSYLAGCGLQSCPMLVAKGYPDIGWNPCGGERYLDFLRFAVFVNGESVEENANVVVRLLIRKPECFGPALRGEGGSGLLAAIEEAIRISEDPARDGPGIRRDRRREHFGEEPPEENRVHLGHAIMSFYAALIDLLGRCAPEMHLIQAGKGEALRIRAILRSLVPLEDLVGIISLPLQIPTLGKDGALVQPKMSASFVPDHKASMVLFLDRVYGIENQDFLLHVLDVGFLPDMRAAASLDTATFSTTEMALALNRYLCLAVLPLITKCAPLFAGTEHRAIMVDSMLHTVYRLSRGRSLTKAQRDVIEDCLMSLCRYIRPSMLQHLLRRLVFDVPILNEFAKMPLKLLTNHYERCWKYYCLPTGWANFGVTSEEELHLTRKLFWGIFDSLAHKKYDPELYRMAMPCLCAIAGALPPDYVDASYSSKAEKKATVDAEGNFDPRPVETLNVIIPEKLDSFINKFAEYTHEKWAFDKIQNNWSYGENIDEELKTHPMLRPYKTFSEKDKEIYRWPIKESLKAMIAWEWTIEKAREGEEEKTEKKKTRKISQSAQTYDPREGYNPQPPDLSAVTLSRELQAMAEQLAENYHNTWGRKKKQELEAKGGGTHPLLVPYDTLTAKEKARDREKAQELLKFLQMNGYAVTRGLKDMELDSSSIEKRFAFGFLQQLLRWMDISQEFIAHLEAVVSSGRVEKSPHEQEIKFFAKILLPLINQYFTNHCLYFLSTPAKVLGSGGHASNKEKEMITSLFCKLAALVRHRVSLFGTDAPAVVNCLHILARSLDARTVMKSGPEIVKAGLRSFFESASEDIEKMVENLRLGKVSQARTQVKGVGQNLTYTTVALLPVLTTLFQHIAQHQFGDDVILDDVQVSCYRTLCSIYSLGTTKNTYVEKLRPALGECLARLAAAMPVAFLEPQLNEYNACSVYTTKSPRERAILGLPNSVEEMCPDIPVLERLMADIGGLAESGARYTEMPHVIEITLPMLCSYLPRWWERGPEAPPSALPAGAPPPCTAVTSDHLNSLLGNILRIIVNNLGIDEASWMKRLAVFAQPIVSRARPELLQSHFIPTIGRLRKRAGKVVSEEEQLRLEAKAEAQEGELLVRDEFSVLCRDLYALYPLLIRYVDNNRAQWLTEPNPSAEELFRMVGEIFIYWSKSHNFKREEQNFVVQNEINNMSFLTADNKSKMAKAGDIQSGGSDQERTKKKRRGDRYSVQTSLIVATLKKMLPIGLNMCAPTDQDLITLAKTRYALKDTDEEVREFLHNNLHLQGKVEGSPSLRWQMALYRGVPGREEDADDPEKIVRRVQEVSAVLYYLDQTEHPYKSKKAVWHKLLSKQRRRAVVACFRMTPLYNLPTHRACNMFLESYKAAWILTEDHSFEDRMIDDLSKAGEQEEEEEEVEEKKPDPLHQLVLHFSRTALTEKSKLDEDYLYMAYADIMAKSCHLEEGGENGEAEEEVEVSFEEKQMEKQRLLYQQARLHTRGAAEMVLQMISACKGETGAMVSSTLKLGISILNGGNAEVQQKMLDYLKDKKEVGFFQSIQALMQTCSVLDLNAFERQNKAEGLGMVNEDGTVINRQNGEKVMADDEFTQDLFRFLQLLCEGHNNDFQNYLRTQTGNTTTINIIICTVDYLLRLQESISDFYWYYSGKDVIEEQGKRNFSKAMSVAKQVFNSLTEYIQGPCTGNQQSLAHSRLWDAVVGFLHVFAHMMMKLAQDSSQIELLKELLDLQKDMVVMLLSLLEGNVVNGMIARQMVDMLVESSSNVEMILKFFDMFLKLKDIVGSEAFQDYVTDPRGLISKKDFQKAMDSQKQFSGPEIQFLLSCSEADENEMINCEEFANRFQEPARDIGFNVAVLLTNLSEHVPHDPRLHNFLELAESILEYFRPYLGRIEIMGASRRIERIYFEISETNRAQWEMPQVKESKRQFIFDVVNEGGEAEKMELFVSFCEDTIFEMQIAAQISEPEGEPETDEDEGAGAAEAGAEGAEEGAAGLEGTAATAAAGATARVVAAAGRALRGLSYRSLRRRVRRLRRLTAREAATAVAALLWAAVTRAGAAGAGAAAGALGLLWGSLFGGGLVEGAKKVTVTELLAGMPDPTSDEVHGEQPAGPGGDADGEGASEGAGDAAEGAGDEEEAVHEAGPGGADGAVAVTDGGPFRPEGAGGLGDMGDTTPAEPPTPEGSPILKRKLGVDGVEEELPPEPEPEPEPELEPEKADAENGEKEEVPEPTPEPPKKQAPPSPPPKKEEAGGEFWGELEVQRVKFLNYLSRNFYTLRFLALFLAFAINFILLFYKVSDSPPGEDDMEGSAAGDVSGAGSGGSSGWGLGAGEEAEGDEDENMVYYFLEESTGYMEPALRCLSLLHTLVAFLCIIGYNCLKVPLVIFKREKELARKLEFDGLYITEQPEDDDVKGQWDRLVLNTPSFPSNYWDKFVKRKVLDKHGDIYGRERIAELLGMDLATLEITAHNERKPNPPPGLLTWLMSIDVKYQIWKFGVIFTDNSFLYLGWYMVMSLLGHYNNFFFAAHLLDIAMGVKTLRTILSSVTHNGKQLVMTVGLLAVVVYLYTVVAFNFFRKFYNKSEDEDEPDMKCDDMMTCYLFHMYVGVRAGGGIGDEIEDPAGDEYELYRVVFDITFFFFVIVILLAIIQGLIIDAFGELRDQQEQVKEDMETKCFICGIGSDYFDTTPHGFETHTLEEHNLANYMFFLMYLINKDETEHTGQESYVWKMYQERCWDFFPAGDCFRKQYEDQLS

SEQ ID NO: 212 - protein, 4870 aa, homo sapiens [sequence omitted]

SEQ ID NO: 213 - protein, 715 aa, homo sapiens
MVQKYQSPVRVYKYPFELIMAAYERRFPTCPLIPMFVGSDTVSEFKSEDGAIHVIERRCKLDVDAPRLLKKIAGVDYVYFVQKNSLNSRERTLHIEAYNETFSNRVIINEHCCYTVHPENEDWTCFEQSASLDIKSFFGFESTVEKIAMKQYTSNIKKGKEIIEYYLRQLEEEGITFVPRWSPPSITPSSETSSSSSKKQAASMAVVIPEAALKEGLSGDALSSPSAPEPVVGTPDDKLDADHIKRYLGDLTPLQESCLIRLRQWLQETHKGKIPKDEHILRFLRARDFNIDKAREIMCQSLTWRKQHQVDYILETWTPPQVLQDYYAGGWHHHDKDGRPLYVLRLGQMDTKGLVRALGEEALLRYVLSVNEERLRRCEENTKVFGRPISSWTCLVDLEGLNMRHLWRPGVKALLRIIEVVEANYPETLGRLLILRAPRVFPVLWTLVSPFIDDNTRRKFLIYAGNDYQGPGGLLDYIDKEIIPDFLSGECMCEVPEGGLVPKSLYRTAEELENEDLKLWTETIYQSASVFKGAPHEILIQIVDASSVITWDFDVCKGDIVFNIYHSKRSPQPPKKDSLGAHSITSPGGNNVQLIDKVWQLGRDYSMVESPLICKEGESVQGSHVTRWPGFYILQWKFHSMPACAASSLPRVDDVLASLQVSSHKCKVMYYTEVIGSEDFRGSMTSLESSHSGFSQLSAATTSSSQSHSSSMISR

SEQ ID NO: 214 - protein, 175 aa, homo sapiens
MEKIPVSAFLLLVALSYTLARDTTVKPGAKKDTKDSRPKLPQTLSRGWGDQLIWTQTYEEALYKSKTSNKPLMIIHHLDECPHSQALKKVFAENKEIQKLAEQFVLLNLVYETTDKHLSPDGQYVPRIMFVDPSLTVRADITGRYSNRLYAYEPADTALLLDNMKKALKLLKTEL

SEQ ID NO: 215 - protein, 961 aa, homo sapiens
MEVPAAGRVPAEGAPTAAVAEVRCPGPAPLRLLEWRVAAGAAVRIGSVLAVFEAAASAQSAGASQSRVASGGCVRPARPERRLRSERAGVVRELCAQPGQVVAPGAVLVRLEGCSHPVVMKGLCAECGQDLTQLQSKNGKQQVPLSTATVSMVHSVPELMVSSEQAEQLGREDQQRLHRNRKLVLMVDLDQTLIHTTEQHCQQMSNKGIFHFQLGRGEPMLHTRLRPHCKDFLEKIAKLYELHVFTFGSRLYAHTIAGFLDPEKKLFSHRILSRDECIDPFSKTGNLRNLFPCGDSMVCIIDDREDVWKFAPNLITVKKYVYFQGTGDMNAPPGSRESQTRKKVNHSRGTEVSEPSPPVRDPEGVTQAPGVEPSNGLEKPARELNGSEAATPRDSPRPGKPDERDIWPPAQAPTSSQELAGAPEPQGSCAQGGRVAPGQRPAQGATGTDLDFDLSSDSESSSESEGTKSSSSASDGESEGKRGRQKPKAAPEGAGALAQGSSLEPGRPAAPSLPGEAEPGAHAPDKEPELGGQEEGERDGLCGLGNGCADRKEAETESQNSELSGVTAGESLDQSMEEEEEEDTDEDDHLIYLEEILVRVHTDYYAKYDRYLNKEIEEAPDIRKIVPELKSKVLADVAIIFSGLHPTNFPIEKTREHYHATALGAKILTRLVLSPDAPDRATHLIAARAGTEKVLQAQECGHLHVVNPDWLWSCLERWDKVEEQLFPLRDDHTKAQRENSPAAFPDREGVPPTALFHPMPVLPKAQPGPEVRIYDSNTGKLIRTGARGPPAPSSSLPIRQEPSSFRAVPPPQPQMFGEELPDAQDGEQPGPSRRKRQPSMSETMPLYTLCKEDLESMDKEVDDILGEGSDDSDSEKRRPEEQEEEPQPRKPGTRRGADARAPASSERSAAGGRGPRGHKRKLNEEDAASESSRESSNEDEGSSSEADEMAKALEAELNDLM

SEQ ID NO: 216 - protein, 653 aa, homo sapiens
MGCSSSSTKTRRSDTSLRAALIIQNWYRGYKARLKARQHYALTIFQSIEYADEQGQMQLSTFFSFMLENYTHIHKEELELRNQSLESEQDMRDRWDYVDSIDVPDSYNGPRLQFPLTCTDIDLLLEAFKEQQILHAHYVLEVLFETKKVLKQMPNFTHIQTSPSKEVTICGDLHGKLDDLFLIFYKNGLPSERNPYVFNGDFVDRGKNSIEILMILCVSFLVYPNDLHLNRGNHEDFMMNLRYGFTKEILHKYKLHGKRILQILEEFYAWLPIGTIVDNEILVIHGGISETTDLNLLHRVERNKMKSVLIPPTETNRDHDTDSKHNKVGVTFNAHGRIKTNGSPTEHLTEHEWEQIIDILWSDPRGKNGCFPNTCRGGGCYFGPDVTSKILNKYQLKMLIRSHECKPEGYEICHDGKVVTIFSASNYYEEGSNRGAYIKLCSGTTPRFFQYQVTKATCFQPLRQRVDTMENSAIKILRERVISRKSDLTRAFQLQDHRKSGKLSVSQWAFCMENILGLNLPWRSLSSNLVNIDQNGNVEYMSSFQNIRIEKPVQEAHSTLVETLYRYRSDLEIIFNAIDTDHSGLISVEEFRAMWKLFSSHYNVHIDDSQVNKLANIMDLNKDGSIDFNEFLKAFYVVHRYEDLMKPDVTNLG

SEQ ID NO: 217 - protein, 3056 aa, homo sapiens [sequence omitted]

SEQ ID NO: 218 - protein, 830 aa, homo sapiens
AAGIGKLSTADGKAFADPEVLRRLTSSVSCALDEAAAALTRMRAESTANAGQSDNRSLAEACSEGDVNAVRKLLIEGRSVNEHTEEGESLLCLACSAGYYELAQVLLAMHANVEDRGIKGDITPLMAAANGGHVKIVKLLLAHKADVNAQSSTGNTALTYACAGGYVDVVKVLLESGASIEDHNENGHTPLMEAGSAGHVEVARLLLENGAGINTHSNEFKESALTLACYKGHLEMVRFLLEAGADQEHKTDEMHTALMEACMDGHVEVARLLLDSGAQVNMPADSFESPLTLAACGGHVELAALLIERGASLEEVNDEGYTPLMEAAREGHEEMVALLLGQGANINAQTEETQETALTLACCGGFLEVADFLIKAGADIELGCSTPLMEAAQEGHLELVKYLLAAGANVHATTATGDTALTYACENGHTDVADVLLQAGADLEHESEGGRTPLMKAARAGHVCTVQFLISKGANVNRTTANNDHTVLSLACAGGHLAVVELLLAHGADPTHRLKDGSTMLIEAAKGGHTSVVCYLLDYPNNLLSAPPPDVTQLTPPSHDLNRAPRVPVQALPMVVPPQEPDKPPANVATTLPIRNKAASKQKSSSHLPANSQDVQGYITNQSPESIVEEAQGKLTELEQRIKEAIEKNAQLQSLELAHADQLTKEKIEELNKTREEQIQKKQKILEELQKVERELQLKTQQQLKKQYLEVKAQRIQLQQQQQQSCQHLGLLTPVGVGEQLSEGDYARLQQVDPVLLKDEPQQTAAQMGFAPIQPLAMPQALPLAAGPLPPGSIANLTELQVLSSLLQPCFLSTLPLILMHRLRVIMTRR

SEQ ID NO: 219 - protein, 93 aa, homo sapiens
MSGLRVYSTSVTGSREIKSQQSEVTRILDGKRIQYQLVDISQDNALRDEMRALAGNPKATPPQIVNGDQYCGDYELFVEAVEQNTLQEFLKLA

SEQ ID NO: 220 - protein, 847 aa, homo sapiens
MSLWGLVSKMPPEKVQRLYVDFPQHLRHLLGDWLESQPWEFLVGSDAFCCNLASALLSDTVQHLQASVGEQGEGSTILQHISTLESIYQRDPLKLVATFRQILQGEKKAVMEQFRHLPMPFHWKQEELKFKTGLRRLQHRVGEIHLLREALQKGAEAGQVSLHSLIETPANGTGPSEALAMLLQETTGELEAAKALVLKRIQIWKRQQQLAGNGAPFEESLAPLQERCESLVDIYSQLQQEVGAAGGELEPKTRASLTGRLDEVLRTLVTSCFLVEKQPPQVLKTQTKFQAGVRFLLGLRFLGAPAKPPLVRADMVTEKQARELSVPQGPGAGAESTGEIINNTVPLENSIPGNCCSALFKNLLLKKIKRCERKGTESVTEEKCAVLFSASFTLGPGKLPIQLQALSLPLVVIVHGNQDNNAKATILWDNAFSEMDRVPFVVAERVPWEKMCETLNLKFMAEVGTNRGLLPEHFLFLAQKIFNDNSLSMEAFQHRSVSWSQFNKEILLGRGFTFWQWFDGVLDLTKRCLRSYWSDRLIIGFISKQYVTSLLLNEPDGTFLLRFSDSEIGGITIAHVIRGQDGSPQIENIQPFSAKDLSIRSLGDRIRDLAQLKNLYPKKPKDEAFRSHYKPEQMGKDGRGYVPATIKMTVERDQPLPTPELQMPTMVPSYDLGMAPDSSMSMQLGPDMVPQVYPPHSHSIPPYQGLSPEESVNVLSAFQEPHLQMPPSLGQMSLPFDQPHPQGLLPCQPQEHAVSSPDPLLCSDVTMVEDSCLSQPVTAFPQGTWIGEDIFPPLLPPTEQDLTKLLLEGQGESGGGSLGAQPLLQPSHYGQSGISMSHMDLRANPSW

SEQ ID NO: 221 - protein, 910 aa, homo sapiens
MDTAEEDICRVCRSEGTPEKPLYHPCVCTGSIKFIHQECLVQWLKHSRKEYCELCKHRFAFTPIYSPDMPSRLPIQDIFAGLVTSIGTAIRYWFHYTLVAFAWLGVVPLTACRIYKCLFTGSVSSLLTLPLDMLSTENLLADCLQGCFVVTCTLCAFISLVWLREQIVHGGAPIWLEHAAPPFNAAGHHQNEAPAGGNGAENVAADQPANPPAENAVVGENPDAQDDQAEEEEEDNEEEDDAGVEDAADANNGAQDDMNWNALEWDRAAEELTWERMLGLDGSLVFLEHVFWVVSLNTLFILVFAFCPYHIGHFSLVGLGFEEHVQASHFEGLITTIVGYILLAITLIICHGLATLVKFHRSRRLLGVCYIVVKVSLLVVVEIGVFPLICGWWLDICSLEMFDATLKDRELSFQSAPGTTMFLHWLVGMVYVFYFASFILLLREVLRPGVLWFLRNLNDPDFNPVQEMIHLPIYRHLRRFILSVIVFGSIVLLMLWLPIRIIKSVLPNFLPYNVMLYSDAPVSELSLELLLLQVVLPALLEQGHTRQWLKGLVRAWTVTAGYLLDLHSYLLGDQEENENSANQQVNNNQHARNNNAIPVVGEGLHAAHQAILQQGGPVGFQPYRRPLNFPLRIFLLIVFMCITLLIASLICLTLPVFAGRWLMSFWTGTAKIHELYTAACGLYVCWLTIRAVTVMVAWMPQGRRVIFQKVKEWSLMIMKTLIVAVLLAGVVPLLLGLLFELVIVAPLRVPLDQTPLFYPWQDWALGVLHAKIIAAITLMGPQWWLKTVIEQVYANGIRNIDLHYIVRKLAAPVISVLLLSLCVPYVIASGVVPLLGVTAEMQNLVHRRIYPFLLMVVVLMAILSFQVRQFKRLYEHIKNDKYLVGQRLVNYERKSGKQGSSPPPPQSSQE

SEQ ID NO: 222 - protein, 292 aa, homo sapiens
MGEKSENCGVPEDLLNGLKVTDTQEAECAGPPVPDPKNQHSQSKLLRDDEAHLQEDQGEEECFHDCSASFEEEPGADKVENKSNEDVNSSELDEEYLIELEKNMSDEEKQKRREESTRLKEEGNEQFKKGDYIEAESSYSRALEMCPSCFQKERSILFSNRAAARMKQDKKEMAINDCSKAIQLNPSYIRAILRRAELYEKTDKLDEALEDYKSILEKDPSIHQAREACMRLPKQIEERNERLKEEMLGKLKDLGNLVLRPFGLSTENFQIKQDSSTGSYSINFVQNPNNNR

SEQ ID NO: 223 - protein, 206 aa, homo sapiens
MRRTGAPAQADSRGRGRARGGCPGGEATLSQPPPRGGTRGQEPQMKETIMNQEKLAKLQAQVRIGGKGTARRKKKVVHRTATADDKKLQFSLKKLGVNNISGIEEVNMFTNQGTVIHFNNPKVQASLAANTFTITGHAETKQLTEMLPSILNQLGADSLTSLRRLAEALPKQSVDGKAPLATGEDDDDEVPDLVENFDEASKNEAN

SEQ ID NO: 224 - protein, 410 aa, homo sapiens
MAKDAGLIEANGELKVFIDQNLSPGKGVVSLVAVHPSTVNPLGKQLLPKTFGQSNVNIAQQVVIGTPQRPAASNTLVVGSPHTPSTHFASQNQPSDSSPWSAGKRNRKGEKNGKGLRHFSMKVCEKVQRKGTTSYNEVADELVAEFSAADNHILPNESAYDQKNIRRRVYDALNVLMAMNIISKEKKEIKWIGLPTNSAQECQNLEVERQRRLERIKQKQSQLQELILQQIAFKNLVQRNRHAEQQASRPPPPNSVIHLPFIIVNTSKKTVIDCSISNDKFEYLFNFDNTFEIHDDIEVLKRMGMACGLESGSCSAEDLKMARSLVPKALEPYVTEMAQGTVGGVFITTAGSTSNGTRFSASDLTNGADGMLATSSNGSQYSGSRVETPVSYVGEDDEEDDDFNENDEDD

SEQ ID NO: 225 - protein, 2275 aa, homo sapiens
MAAERRCGSMRDLRAQVTSGLLPFPEVTLQALGEDEITLESVLRGKFAAGKNGLACLACGPQLEVVNSITGERLSAYRFSGVNEQPPVVLAVKEFSWQKRTGLLIGLEETEGSVLCLYDLGISKVVKAVVLPGRVTAIEPIINHGGASASTQHLHPSLRWLFGVAAVVTDVGQILLVDLCLDDLSCNQNEVEASDLEVLTGIPAEVPHIRESVMRQGRHLCFQLVSPTGTAVSTLSYISRTNQLAVGFSDGYLALWNMKSMKREYYIQLESGQVPVYAVTFQEPENDPRNCCYLWAVQSTQDSEGDVLSLHLLQLAFGNRKCLASGQILYEGLEYCEERYTLDLTGGMFPLRGQTSNTKLLGCQSIEKFRSHGDREEGVNEALSPDTSVSVFTWQVNIYGQGKPSVYLGLFDINRWYHAQMPDSLRSGEYLHNCSYFALWSLESVVSRTSPHGILDILVHERSLNRGVPPSYPPPEQFFNPSTYNFDATCLLNSGVVHLTCTGFQKETLTFLKKSGPSLNELIPDGYNRCLVAGLLSPRFVDVQPSSLSQEEQLEAILSAAIQTSSLGLLTGYIRRWITEEQPNSATNLRFVLEWTWNKVVLTKEEFDRLCVPLFDGSCHFMDPQTIQSIQQCYLLLSNLNIVLSCFASEAREITERGLIDLSNKFVVSHLICQYAQVVLWFSHSGLLPEGIDDSVQLSRLCYNYPVIQNYYTSRRQKFERLSRGKWNPDCLMIDGLVSQLGERIEKLWKRDEGGTGKYPPASLHAVLDMYLLDGVTEAAKHSITIYLLLDIMYSFPNKTDTPIESFPTVFAISWGQVKLIQGFWLIDHNDYESGLDLLFHPATAKPLSWQHSKIIQAFMSQGEHRQALRYIQTMKPTVSSGNDVILHLTVLLFNRCMVEAWNFLRQHCNRLNIEELLKHMYEVCQEMGLMEDLLKLPFTDTEQECLVKFLQSSASVQNHEFLLVHHLQRANYVPALKLNQTLKINVMNDRDPRLRERSLARNSILDQYGKILPRVHRKLAIERAKPYHLSTSSVFRLVSRPKPLSAVPKQVVTGTVLTRSVFINNVLSKIGEVWASKEPINSTTPFNSSKIEEPSPIVYSLPAPELPEAFFGTPISKASQKISRLLDLVVQPVPRPSQCSEFIQQSSMKSPLYLVSRSLPSSSQLKGSPQAISRASELHLLETPLVVKKAKSLAMSVTTSGFSEFTPQSILRSTLRSTPLASPSPSPGRSPQRLKETRISFVEEDVHPKWIPGAADDSKLEVFTTPKKCAVPVETEWLKSKDRTTSFFLNSPEKEHQEMDEGSQSLEKLDVSKGNSSVSITSDETTLEYQDAPSPEDLEETVFTASKPKSSSTALTTNVTEQTEKDGDKDVFASEVTPSDLQKQMGNLEDAETKDLLVAAEAFSELNHLSPVQGTEASLCAPSVYEGKIFTQKSKVPVLDEGLTSVETYTPAIRANDNKSMADVLGDGGNSSLTISEGPIVSERRLNQEVALNLKEDHEVEVGVLKESVDLPEEKLPISDSPPDTQEIHVIEQEKLEAQDSGEEARNLSFNELYPSGTLKLQYNFDTIDQQFCDLADNKDTAECDIAEVDGELFVAQSNFTLILEGEEGEVEPGDFASSDVLPKAANTATEEKLVCSGENDNHGQIANLPSAVTSDQKSQKVDTLPYVPEPIKVAIAENLLDVIKDTRSKEITSDTMEQSIHETIPLVSQNIMCPTKLVKSAFKTAQETSTMTMNVSQVDDVVSSKTRTRGQRIQNVNVKSAQQEASADVATPKMPGQSVRKKTRKAKEISEASENIYSDVRGLSQNQQIPQNSVTPRRGRRKKEVNQDILENTSSVEQELQITTGRESKRLKSSQLLEPAVEETTKKEVKVSSVTKRTPRRIKRSVENQESVEIINDLKVSTVTSPSRMIRKLRSTNLDASENTGNKQDDKSSDKQLRIKHVRRVRGREVSPSDVREDSNLESSQLTVQAEFDMSAIPRKRGRPRKINPSEDVGSKAVKEERSPKKKEAPSIRRRSTRNTPAKSENVDVGKPALGKSILVPNEELSMVMSSKKKLTKKTESQSQKRSLHSVSEERTDEMTHKETNEQEERLLATASFTKSSRSSRTRSSKAILLPDLSEPNNEPLFSPASEVPRKAKAKKIEVPAQLKELVSDLSSQFVISPPALRSRQKNTSNKNKLEDELKDDAQSVETLGKPKAKRIRTSKTKQASKNTEKESAWSPPPIEIRLISPLASPADGVKSKPRKTTEVTGTGLGRNRKKLSSYPKQILRRKML

SEQ ID NO: 226 - protein, 1872 aa, homo sapiens
MGPGCDLLLRTAATITAAAIMSDTDSDEDSAGGGPFSLAGFLFGNINGAGQLEGESVLDDECKKHLAGLGALGLGSLITELTANEELTGTDGALVNDEGWVRSTEDAVDYSDINEVAEDESRRYQQTMGSLQPLCHSDYDEDDYDADCEDIDCKLMPPPPPPPGPMKKDKDQDSITGEKVDFSSSSDSESEMGPQEATQAESEDGKLTLPLAGIMQHDATKLLPSVTELFPEFRPGKVLRFLRLFGPGKNVPSVWRSARRKRKKKHRELIQEEQIQEVECSVESEVSQKSLWNYDYAPPPPPEQCLSDDEITMMAPVESKFSQSTGDIDKVTDTKPRVAEWRYGPARLWYDMLGVPEDGSGFDYGFKLRKTEHEPVIKSRMIEEFRKLEENNGTDLLADENFLMVTQLHWEDDIIWDGEDVKHKGTKPQRASLAGWLPSSMTRNAMAYNVQQGFAATLDDDKPWYSIFPIDNEDLVYGRWEDNIIWDAQAMPRLLEPPVLTLDPNDENLILEIPDEKEEATSNSPSKESKKESSLKKSRILLGKTGVIKEEPQQNMSQPEVKDPWNLSNDEYYYPKQQGLRGTFGGNIIQHSIPAVELRQPFFPTHMGPIKLRQFHRPPLKKYSFGALSQPGPHSVQPLLKHIKKKAKMREQERQASGGGEMFFMRTPQDLTGKDGDLILAEYSEENGPLMMQVGMATKIKNYYKRKPGKDPGAPDCKYGETVYCHTSPFLGSLHPGQLLQAFENNLFRAPIYLHKMPETDFLIIRTRQGYYIRELVDIFVVGQQCPLFEVPGPNSKRANTHIRDFLQVFIYRLFWKSKDRPRRIRMEDIKKAFPSHSESSIRKRLKLCADFKRTGMDSNWWVLKSDFRLPTEEEIRAMVSPEQCCAYYSMIAAEQRLKDAGYGEKSFFAPEEENEEDFQMKIDDEVRTAPWNTTRAFIAAMKGKCLLEVTGVADPTGCGEGFSYVKIPNKPTQQKDDKEPQPVKKTVTGTDADLRRLSLKNAKQLLRKFGVPEEEIKKLSRWEVIDVVRTMSTEQARSGEGPMSKFARGSRFSVAEHQERYKEECQRIFDLQNKVLSSTEVLSTDTDSSSAEDSDFEEMGKNIENMLQNKKTSSQLSREREEQERKELQRMLLAAGSAASGNNHRDDDTASVTSLNSSATGRCLKIYRTFRDEEGKEYVRCETVRKPAVIDAYVRIRTTKDEEFIRKFALFDEQHREEMRKERRRIQEQLRRLKRNQEKEKLKGPPEKKPKKMKERPDLKLKCGACGAIGHMRTNKFCPLYYQTNAPPSNPVAMTEEQEEELEKTVIHNDNEELIKVEGTKIVLGKQLIESADEVRRKSLVLKFPKQQLPPKKKRRVGTTVHCDYLNRPHKSIHRRRTDPMVTLSSILESIINDMRDLPNTYPFHTPVNAKVVKDYYKIITRPMDLQTLRENVRKRLYPSREEFREHLELIVKNSATYNGPKHSLTQISQSMLDLCDEKLKEKEDKLARLEKAINPLLDDDDQVAFSFILDNIVTQKMMAVPDSWPFHHPVNKKFVPDYYKVIVNPMDLETIRKNISKHKYQSRESFLDDVNLILANSVKYNGPESQYTKTAQEIVNVCYQTLTEYDEHLTQLEKDICTAKEAALEEAELESLDPMTPGPYTPQPPDLYDTNTSLSMSRDASVFQDESNMSVLDIPSATPEKQVTQEGEDGDGDLADEEEGTVQQPQASVLYEDLLMSEGEDDEEDAGSDEEGDNPFSAIQLSESGSDSDVGSGGIRPKQPRMLQENTRMDMENEESMMSYEGDGGEASHGLEDSNISYGSYEEPDPKSNTQDTSFSSIGGYEVSEEEEDEEEEEQRSGPSVLSQVHLSEDEEDSEDFHSIAGDSDLDSDE

SEQ ID NO: 227 - protein, 727 aa, homo sapiens
MEGDAVEAIVEESETFIKGKERKTYQRRREGGQEEDACHLPQNQTDGGEVVQDVNSSVQMVMMEQLDPTLLQMKTEVMEGTVAPEAEAAVDDTQIITLQVVNMEEQPINIGELQLVQVPVPVTVPVATTSVEELQGAYENEVSKEGLAESEPMICHTLPLPEGFQVVKVGANGEVETLEQGELPPQEDPSWQKDPDYQPPAKKTKKTKKSKLRYTEEGKDVDVSVYDFEEEQQEGLLSEVNAEKVVGNMKPPKPTKIKKKGVKKTFQCELCSYTCPRRSNLDRHMKSHTDERPHKCHLCGRAFRTVTLLRNHLNTHTGTRPHKCPDCDMAFVTSGELVRHRRYKHTHEKPFKCSMCDYASVEVSKLKRHIRSHTGERPFQCSLCSYASRDTYKLKRHMRTHSGEKPYECYICHARFTQSGTMKMHILQKHTENVAKFHCPHCDTVIARKSDLGVHLRKQHSYIEQGKKCRYCDAVFHERYALIQHQKSHKNEKRFKCDQCDYACRQERHMIMHKRTHTGEKPYACSHCDKTFRQKQLLDMHFKRYHDPNFVPAAFVCSKCGKTFTRRNTMARHADNCAGPDGVEGENGGETKKSKRGRKRKMRSKKEDSSDSENAEPDLDDNEDEEEPAVEIEPEPEPQPVTPAPPPAKKRRGRPPGRTNQPKQNQPTAIIQVEDQNTGAIENIIVEVKKEPDAEPAEGEEEEAQPAATDAPNGDLTPEMILSMMDR

SEQ ID NO: 228 - protein, 1182 aa, homo sapiens
MGQQVGRVGEAPGLQQPQPRGIRGSSAARPSGRRRDPAGRTTETGFNIFTQHDHFASCVEDGFEGDKTGGSSPEALHRPYGCDVEPQALNEAIRWSSKENLLGATESDPNLFVALYDFVASGDNTLSITKGEKLRVLGYNQNGEWSEVRSKNGQGWVPSNYITPVNSLEKHSWYHGPVSRSAAEYLLSSLINGSFLVRESESSPGQLSISLRYEGRVYHYRINTTADGKVYVTAESRFSTLAELVHHHSTVADGLVTTLHYPAPKCNKPTVYGVSPIHDKWEMERTDITMKHKLGGGQYGEVYVGVWKKYSLTVAVKTLKEDTMEVEEFLKEAAVMKEIKHPNLVQLLGVCTLEPPFYIVTEYMPYGNLLDYLRECNREEVTAVVLLYMATQISSAMEYLEKKNFIHRDLAARNCLVGENHVVKVADFGLSRLMTGDTYTAHAGAKFPIKWTAPESLAYNTFSIKSDVWAFGVLLWEIATYGMSPYPGIDLSQVYDLLEKGYRMEQPEGCPPKVYELMRACWKWSPADRPSFAETHQAFETMFHDSSISEEVAEELGRAASSSSVVPYLPRLPILPSKTRTLKKQVENKENIEGAQDATENSASSLAPGFIRGAQASSGSPALPRKQRDKSPSSLLEDAKETCFTRDRKGGFFSSFMKKRNAPTPPKRSSSFREMENQPHKKYELTGNFSSVASLQHADGFSFTPAQQEANLVPPKCYGGSFAQRNLCNDDGGGGGGSGTAGGGWSGITGFFTPRLIKKTLGLRAGKPTASDDTSKPFPRSNSTSSMSSGLPEQDRMAMTLPRNCQRSKLQLERTVSTSSQPEENVDRANDMLPKKSEESAAPSRERPKAKLLPRGATALPLRTPSGDLAITEKDPPGVGVAGVAAAPKGKEKNGGARLGMAGVPEDGEQPGWPSPAKAAPVLPTTHNHKVPVLISPTLKHTPADVQLIGTDSQGNKFKLLSEHQVTSSGDKDRPRRVKPKCAPPPPPVMRLLQHPSICSDPTEEPTALTAGQSTSETQEGGKKAALGAVPISGKAGRPVMPPPQVPLPTSSISPAKMANGTAGTKVALRKTKQAAEKISADKISKEALLECADLLSSALTEPVPNSQLVDTGHQLLDYCSGYVDCIPQTRNKFAFREAVSKLELSLQELQVSSAAAGVPGTNPVLNNLLSCVQEISDVVQR

SEQ ID NO: 229 - protein, 981 aa, homo sapiens
MAEGGAADLDTQRSDIATLLKTSLRKGDTWYLVDSRWFKQWKKYVGFDSWDKYQMGDQNVYPGPIDNSGLLKDGDAQSLKEHLIDELDYILLPTEGWNKLVSWYTLMEGQEPIARKVVEQGMFVKHCKVEVYLTELKLCENGNMNNVVTRRFSKADTIDTIEKEIRKIFSIPDEKETRLWNKYMSNTFEPLNKPDSTIQDAGLYQGQVLVIEQKNEDGTWPRGPSTPKSPGASNFSTLPKISPSSLSNNYNNMNNRNVKNSNYCLPSYTAYKNYDYSEPGRNNEQPGLCGLSNLGNTCFMNSAIQCLSNTPPLTEYFLNDKYQEELNFDNPLGMRGEIAKSYAELIKQMWSGKFSYVTPRAFKTQVGRFAPQFSGYQQQDCQELLAFLLDGLHEDLNRIRKKPYIQLKDADGRPDKVVAEEAWENHLKRNDSIIVDIFHGLFKSTLVCPECAKISVTFDPFCYLTLPLPMKKERTLEVYLVRMDPLTKPMQYKVVVPKIGNILDLCTALSALSGIPADKMIVTDIYNHRFHRIFAMDENLSSIMERDDIYVFEININRTEDTEHVIIPVCLREKFRHSSYTHHTGSSLFGQPFLMAVPRNNTEDKLYNLLLLRMCRYVKISTETEETEGSLHCCKDQNINGNGPNGIHEEGSPSEMETDEPDDESSQDQELPSENENSQSEDSVGGDNDSENGLCTEDTCKGQLTGHKKRLFTFQFNNLGNTDINYIKDDTRHIRFDDRQLRLDERSFLALDWDPDLKKRYFDENAAEDFEKHESVEYKPPKKPFVKLKDCIELFTTKEKLGAEDPWYCPNCKEHQQATKKLDLWSLPPVLVVHLKRFSYSRYMRDKLDTLVDFPINDLDMSEFLINPNAGPCRYNLIAVSNHYGGMGGGHYTAFAKNKDDGKWYYFDDSSVSTASEDQIVSKAAYVLFYQRQDTFSGTGFFPLDRETKGASAATGIPLESDEDSNDNDNDIENENCMHTN

SEQ ID NO: 230 - protein, 424 aa, homo sapiens
MDSGPLWDANPTPRGTLSAPNATTPWLGRDEELAKVEIGVLATVLVLATGGNLAVLLTLGQLGRKRSRMHLFVLHLALTDLAVALFQVLPQLLWDITYRFQGPDLLCRAVKYLQVLSMFASTYMLLAMTLDRYLAVCHPLRSLQQPGQSTYLLIAAPWLLAAIFSLPQVFIFSLREVIQGSGVLDCWADFGFPWGPRAYLTWTTLAIFVLPVTMLTACYSLICHEICKNLKVKTQAWRVGGGGWRTWDRPSPSTLAATTRGLPSRVSSINTISRAKIRTVKMTFVIVLAYIACWAPFFSVQMWSVWDKNAPDEDSTNVAFTISMLLGNLNSCCNPWIYMGFNSHLLPRPLRHLACCGGPQPRMRRRLSDGSLSSRHTTLLTRSSCPATLSLSLSLTLSGRPRPEESPRDLELADGEGTAETIIF

SEQ ID NO: 231 - protein, 943 aa, homo sapiens
MGLTKQYLRYVASAVFGVIGSQKGNIVFVTLRGEKGRYVAVPACEHVFIWDLRKGEKILILQGLKQEVTCLCPSPDGLHLAVGYEDGSIRIFSLLSGEGNVTFNGHKAAITTLKYDQLGGRLASGSKDTDIIVWDVINESGLYRLKGHKDAITQALFLREKNLLVTSGKDTMVKWWDLDTQHCFKTMVGHRTEVWGLVLLSEEKRLITGASDSELRVWDIAYLQEIEDPEEPDPKKIKGSSPGIQDTLEAEDGAFETDEAPEDRILSCRKAGSIMREGRDRVVNLAVDKTGRILACHGTDSVLELFCILSKKEIQKKMDKKMKKARKKAKLHSSKGEEEDPEVNVEMSLQDEIQRVTNIKTSAKIKSFDLIHSPHGELKAVFLLQNNLVELYSLNPSLPTPQPVRTSRITIGGHRSDVRTLSFSSDNIAVLSAAADSIKIWNRSTLQCIRTMTCEYALCSFFVPGDRQVVIGTKTGKLQLYDLASGNLLETIDAHDGALWSMSLSPDQRGFVTGGADKSVKFWDFELVKDENSTQKRLSVKQTRTLQLDEDVLCVSYSPNQKLLAVSLLDCTVKIFYVDTLKFFLSLYGHKLPVICMDISHDGALIATGSADRNVKIWGLDFGDCHKSLFAHDDSVMYLQFVPKSHLFFTAGKDHKIKQWDADKFEHIQTLEGHHQEIWCLAVSPSGDYVVSSSHDKSLRLWERTREPLILEEEREMEREAEYEESVAKEDQPAVPGETQGDSYFTGKKTIETVKAAERIMEAIELYREETAKMKEHKAICKAAGKEVPLPSNPILMAYGSISPSAYVLEIFKGIKSSELEESLLVLPFSYVPDILKLFNEFIQLGSDVELICRCLFFLLRIHFGQITSNQMLVPVIEKLRETTISKVSQVRDVIGFNMAGLDYLKRECEAKSEVMFFADATSHLEEKKRKRKKREKLILTLT

SEQ ID NO: 232 - protein, 9 aa, homo sapiens
WITHDRAWN

SEQ ID NO: 233 - protein, 1914 aa, homo sapiens
MADGKGDAAAVAGAGAEAPAVAGAGDGVETESMVRGHRPVSPAPGASGLRPCLWQLETELREQEVSEVSSLNYCRSFCQTLLQYASNKNASEHIVYLLEVYRLAIQSFASARPYLTTECEDVLLVLGRLVLSCFELLLSVSESELPCEVWLPFLQSLQESHDALLEFGNNNLQILVHVTKEGVWKNPVLLKILSQQPVETEEVNKLIAQEGPSFLQMRIKHLLKSNCIPQATALSKLCAESKEISNVSSFQQAYITCLCSMLPNEDAIKEIAKVDCKEVLDIICNLESEGQDNTAFVLCTTYLTQQLQTASVYCSWELTLFWSKLQRRIDPSLDTFLERCRQFGVIAKTQQHLFCLIRVIQTEAQDAGLGVSILLCVRALQLRSSEDEEMKASVCKTIACLLPEDLEVRRACQLTEFLIEPSLDGFNMLEELYLQPDQKFDEENAPVPNSLRCELLLALKAHWPFDPEFWDWKTLKRHCHQLLGQEASDSDDDLSGYEMSINDTDVLESFLSDYDEGKEDKQYRRRDLTDQHKEKRDKKPIGSSERYQRWLQYKFFCLLCKRECIEARILHHSKMHMEDGIYTCPVCIKKFKRKEMFVPHVMEHVKMPPSRRDRSKKKLLLKGSQKGICPKSPSAIPEQNHSLNDQAKGESHEYVTFSKLEDCHLQDRDLYPCPGTDCSRVFKQFKYLSVHLKAEHQNNDENAKHYLDMKNRREKCTYCRRHFMSAFHLREHEQVHCGPQPYMCVSIDCYARFGSVNELLNHKQKHDDLRYKCELNGCNIVFSDLGQLYHHEAQHFRDASYTCNFLGCKKFYYSKIEYQNHLSMHNVENSNGDIKKSVKLEESATGEKQDCINQPHLLNQTDKSHLPEDLFCAESANSQIDTETAENLKENSDSNSSDQLSHSSSASMNEELIDTLDHSETMQDVLLSNEKVFGPSSLKEKCSSMAVCFDGTKFTCGFDGCGSTYKNARGMQKHLRKVHPYHFKPKKIKTKDLFPSLGNEHNQTTEKLDAEPKPCSDTNSDSPDEGLDHNIHIKCKREHQGYSSESSICASKRPCTEDTMLELLLRLKHLSLKNSITHGSFSGSLQGYPSSGAKSLQSVSSISDLNFQNQDENMPSQYLAQLAAKPFFCELQGCKYEFVTREALLMHYLKKHNYSKEKVLQLTMFQHRYSPFQCHICQRSFTRKTHLRIHYKNKHQIGSDRATHKLLDNEKCDHEGPCSVDRLKGDCSAELGGDPSSNSEKPHCHPKKDECSSETDLESSCEETESKTSDISSPIGSHREEQEGREGRGSRRTVAKGNLCYILNKYHKPFHCIHKTCNSSFTNLKGLIRHYRTVHQYNKEQLCLEKDKARTKRELVKCKKIFACKYKECNKRFLCSKALAKHCSDSHNLDHIEEPKVLSEAGSAARFSCNQPQCPAVFYTFNKLKHHLMEQHNIEGEIHSDYEIHCDLNGCGQIFTHRSNYSQHVYYRHKDYYDDLFRSQKVANERLLRSEKVCQTADTQGHEHQTTRRSFNAKSKKCGLIKEKKAPISFKTRAEALHMCVEHSEHTQYPCMVQGCLSVVKLESSIVRHYKRTHQMSSAYLEQQMENLVVCVKYGTKIKEEPPSEADPCIKKEENRSCESERTEHSHSPGDSSAPIQNTDCCHSSERDGGQKGCIESSSVFDADTLLYRGTLKCNHSSKTTSLEQCNIVQPPPPCKIENSIPNPNGTESGTYFTSFQLPLPRIKESETRQHSSGQENTVKNPTHVPKENFRKHSQPRSFDLKTYKPMGFESSFLKFIQESEEKEDDFDDWEPSEHLTLSNSSQSSNDLTGNVVANNMVNDSEPEVDIPHSSSDSTIHENLTAIPPLIVAETTTVPSLENLRVVLDKALTDCGELALKQLHYLRPVVVLERSKFSTPILDLFPTKKTDELCVGSS

1. An isolated oligopeptide or peptide comprising at least one epitopic peptide selected from the group consisting of SEQ ID NOS: 1 to 123.

2. The oligopeptide of claim 1 wherein said polypeptide comprises at least two of said epitopic peptides.

3. The oligopeptide of claim 1 wherein said polypeptide comprises at least three of said epitopic peptides.

4. An oligopeptide or peptide comprising at least one epitopic peptide having at least one amino acid difference from an amino acid sequence selected from the group consisting of SEQ ID NO: 1 to 123.

6. The oligopeptide of claim 4 wherein said one amino acid difference is the result of a conservative amino acid substitution.

7. The oligopeptide of claim 4 wherein said substitution is the substitution of one hydrophobic amino acid by another hydrophobic amino acid.

8. The oligopeptide of claim 4 wherein said amino acid difference is the addition or deletion of one amino acid to or from said oligopeptide.

9. A nucleic acid comprising a polynucleotide that encodes a polypeptide.

10.-13. (canceled)

14. A composition comprising an immunogen of claim 1 present in a pharmaceutically acceptable carrier and in an amount sufficient to elicit production of antibodies or cells that react with said immunogen when said immunogen is administered to an immunologically competent animal.

15. An antibody specific for an immunogen of claim 1.

16. A method for treating a subject with cancer, said cancer characterized by tumor cells expressing any class I MHC molecule, comprising administering to said subject a composition comprising
at least one polypeptide comprising an epitopic peptide comprising an amino acid sequence selected from the group consisting of SEQ ID NO: 1 to 123 in an amount sufficient to induce a CTL response to said tumor cells; or
at least one polypeptide comprising an epitopic peptide having at least one amino acid difference from an amino acid sequence selected from the group consisting of SEQ ID NO: 1 to 123 in an amount sufficient to induce a CTL response to said tumor cells.

17.-27. (canceled)

28. A method for treating a subject with cancer, said cancer characterized by tumor cells expressing any class I MHC molecule, said method comprising administering to said subject a composition comprising a polynucleotide comprising a nucleic acid sequence encoding
at least one polypeptide comprising an epitopic peptide comprising an amino acid sequence selected from the group consisting of SEQ ID NO: 1 to 123 in an amount sufficient to induce a CTL response to said tumor cells; or
at least one polypeptide comprising an epitopic peptide comprising one amino acid difference from an amino acid sequence selected from the group consisting of SEQ ID NO: 1 to 123 in an amount sufficient to induce a CTL response to said tumor cells.

29.-33. (canceled)

34. A method for treating a subject with cancer, said cancer characterized by tumor cells expressing HLA A1, A2, or A3 supertypes, said method comprising
administering to said subject induced CTLs in an amount sufficient to destroy the tumor cells through direct lysis or to effect the destruction of the tumor cells indirectly through the elaboration of cytokines, said CTLs induced by a process comprising
inducing a cytotoxic T lymphocyte (CTL) in vitro that is specific for said tumor cells by contacting a precursor CTL with:
at least one polypeptide comprising an epitopic peptide comprising an amino acid sequence selected from the group consisting of SEQ ID NO: 1 to 123 under conditions that generate a CTL response to said tumor cells; or
at least one polypeptide comprising an epitopic peptide comprising one amino acid difference from an amino acid sequence selected from the group consisting of SEQ ID NO: 1 to 123 under conditions that generate a CTL response to said tumor cells.

35. A method for treating a subject with cancer, said cancer characterized by tumor cells expressing any class I MHC molecule, said method comprising
administering to said subject induced CTLs in an amount sufficient to destroy the tumor cells through direct lysis or to effect the destruction of the tumor cells indirectly through the elaboration of cytokines, said CTLs induced by a process comprising
inducing a cytotoxic T lymphocyte (CTL) in vitro that is specific for said tumor cells by contacting a precursor CTL with:
at least one polypeptide comprising an epitopic peptide comprising an amino acid sequence selected from the group consisting of SEQ ID NO: 124 to 233 under conditions that generate a CTL response to said tumor cells; or
at least one polypeptide comprising an epitopic peptide comprising one amino acid difference from an amino acid sequence selected from the group consisting of SEQ ID NO: 124 to 233 under conditions that generate a CTL response to said tumor cells.

36. A method for inducing a cytotoxic T lymphocyte (CTL) in vitro that is specific for a tumor cell expressing HLA A1, A2, or A3 supertypes comprising contacting a precursor CTL with:
at least one polypeptide comprising an epitopic peptide comprising an amino acid sequence selected from the group consisting of SEQ ID NO: 1 to 123 under conditions that generate a CTL response to said tumor cells; or
at least one polypeptide comprising an epitopic peptide comprising one amino acid difference from an amino acid sequence selected from the group consisting of SEQ ID NO: 1 to 123 under conditions that generate a CTL response to said tumor cells.

37. A process for inducing a CTL response in vitro that is specific for a tumor cell expressing HLA A1, A2, or A3 supertypes, said process comprising contacting a precursor CTL with a cell comprising
a polynucleotide comprising a nucleic acid sequence encoding at least one polypeptide comprising an epitopic peptide comprising an amino acid sequence selected from the group consisting of SEQ ID NO: 1 to 123; or
a polynucleotide comprising a nucleic acid sequence encoding at least one polypeptide comprising an epitopic peptide comprising one amino acid difference from an amino acid sequence selected from the group consisting of SEQ ID NO: 1 to 123.

38.-41. (canceled)

42. A method for treating a subject with cancer, said method comprising:
stimulating the production of antibodies for use in passive immunotherapy, wherein said antibodies react with
at least one polypeptide comprising an epitopic peptide comprising an amino acid sequence selected from the group consisting of SEQ ID NO: 1 to 123; or
at least one polypeptide comprising an epitopic peptide comprising one amino acid difference from an amino acid sequence selected from the group consisting of SEQ ID NO: 1 to 123.

43. (canceled)

44. A method for diagnosing the presence of cancer in a subject comprising obtaining a tissue sample from said subject; and
detecting
at least one polypeptide comprising an epitopic peptide comprising an amino acid sequence selected from the group consisting of SEQ ID NO: 1 to 123; or
at least one polypeptide comprising an epitopic peptide comprising one amino acid difference from an amino acid sequence selected from the group consisting of SEQ ID NO: 1 to 123;
in said sample.

45.-48. (canceled)

49. The method of claim 16 wherein said cancer is selected from the group consisting of breast carcinoma, ovarian carcinoma, colorectal carcinoma, lung carcinoma, and prostate carcinoma.

50. (canceled)
